(19) United States
(12) Patent Application Publication
(10) Pub. No.: US 2016/0017360 A1
(43) Pub. Date: Jan. 21, 2016

(54) FUNCTIONAL EXPRESSION OF BACTERIAL MAJOR FACILITATOR SUPERFAMILY MFS GENE IN MAIZE TO IMPROVE AGRONOMIC TRAITS AND GRAIN YIELD

(71) Applicants: PIONEER HI-BRED INTERNATIONAL, INC., Johnston, IA (US); E.I. DUPONT DE NEMOURS & COMPANY, Wilmington, DE (US)

(72) Inventors: Robel KAHSAY, NEWARK, DE (US); Dale F. LOUSSAERT, CLIVE, IA (US); Bo SHEN, JOHNSTON, IA (US); Jean-Francois TOMB, WILMINGTON, DE (US); Haiyin WANG, JOHNSTON, IA (US); Zhenglin HOU, ANKENY, IA (US)

(21) Appl. No.: 14/770,905

(22) PCT Filed: Mar. 5, 2014
(86) PCT No.: PCT/US14/20642

§ 371 Date: Aug. 27, 2015

Related U.S. Application Data
(60) Provisional application No. 61/779,339, filed on Mar. 13, 2013.

(51) Int. Cl. C12N 15/82

(52) U.S. Cl. CPC C12N 15/8261; C12N 15/8273

(57) ABSTRACT

Methods for modulating plants using optimized Bacterial MFS constructs are disclosed. Also disclosed are nucleotide sequences, constructs, vectors, and modified plant cells, as well as transgenic plants displaying increased seed and/or biomass yield, improved tolerance to abiotic stress such as drought or high plant density, improved nitrogen utilization efficiency, increased ear tissue growth or kernel number.

### FIELD

[0001] This disclosure relates generally to the field of molecular biology and the modulation of expression or activity of genes and proteins affecting yield, abiotic stress tolerance and nitrogen utilization efficiency in plants.

### BACKGROUND

[0002] Grain yield improvements by conventional breeding have nearly reached a plateau in maize. It is natural then to explore some alternative, non-conventional approaches that could be employed to obtain further yield increases. However, to meet the demand of rapid population in future, much more increases in food production is required. The scale of the increase requires the involvement of new technologies such as transgene-based improvement in agronomic traits. The disclosure can be used for transgene-based improvements of agronomic traits. The described gene can be used to improve N use efficiency, increase grain yield and shorten crop maturity.

[0003] Nitrate is the major nitrogen source for maize. Nitrate uptake is an active process which is against an electrochemical potential gradient of the plasma membranes and facilitated by nitrate transporters. Nitrate transporters are also involved in nitrate translocation within the plants. Nitrate transporters are classified into low- and high-affinity nitrate transporter systems (LATS and HATS). Two-component HATS composed of a typical carrier-type protein (NRT2) and an additional small associated membrane protein (NAR2) are reported in green algae and plants and single-component HATS are mostly found in bacteria, fungi, and algae. LATS is a typical carrier-type protein containing ˜12 transmembrane. NRT2 and NRT1 share less homolog in sequences and belong to Major Facilitator Superfamily (MFS) and Peptide Transporter (PTR) family, respectively. In general, LATS are active when soil nitrate concentration is higher than 1 mM and HATS are responsible when soil nitrate concentration is lower than 1 mM.

[0004] A transgenic approach via overexpressing single-component HATS to improve nitrate uptake and yield is promosing. Yeast nitrate transporter (YNT1) and YNT1 shuffled variants showed yield advantage in the field. To expand the diversity of canadiate genes to be tested in transgenic maize pipeline, bacterial MFS genes were inditified with a blast search against the GenBank non-redundant database (NR) and environmental database ENV_NR as well as GQPAT (patent database from GenomeQuest). After studying on thousands of putative bacterial MFS sequences, 52 MFSs were nominated from 33 non-pathogenic bacterial strains. MFSs were selected, codon optimized for maize expression, driven by root-preferred promoter (ZmRM2 PRO) and/or constitutive promoter (ZmUBI PRO), and transformed into GS3xGaspe background. Constructs had efficacy to improve ear related traits, e.g. ear length, ear width, ear area, and/or seed numbers under 4 mM nitrate conditions at T0 generation and advanced to further phenotyping on ear traits and nitrate uptake at T1 generation. The constructs had efficacy to improve ear related traits at T1 reproduction assay under limited either nitrogen or water conditions were transformed into elite background for yield testing in field. The MFSs have potential to be used to develop commercial products which improve NUE and other agronomic traits, including further optimization and/or stacking with other genes for improving abiotic stress tolerance, nitrate assimilations and/or root structures. This disclosure also demonstrates that LATS is plant-specific after the blast search.

### SUMMARY

[0005] Nitrate uptake is an active process and facilitated by nitrate transporters. The two components (NRT2 and NAR2) of plant HATS interact directly and are required to uptake nitrate. Over-expression of tobacco endogenous high affinity nitrate transporters (NRT2) failed to improve nitrate uptake due to missing the associated protein (Fraisier, et al., 2000). Plant HATS also involved in nitrate response signaling and regulation of root growth. Modification of endogenous Nrt2 expression may cause negative effects. However, over-expression of a single-component high affinity nitrate transporter from non-plant organisms, e.g. yeast or bacteria, will overcome these disadvantages and improve nitrate utilization efficiency.

[0006] Seventeen gene families of transporters were classified based on sequence similaririties within MFS (Pao, et al., 1998) and 15 gene families contain transporter genes from bacteria which include transporters for sugar, oligosaccharide, metabolite, nitrate, phosphate, nucleoside, anion and/or drugs. However, the substrate specificity of a given MFS gene needs to be experimental confirmed.

[0007] The individual bacterial MFS was expressed in maize to improve nitrate uptake and/or grain yield. Transgenic plants with Bacterial MFS expression, produced statistically significant increase of ear length, ear width, ear area and/or kernel number per ear in T0 phenomics in GS3/GASPE/GASPE background. Therefore, the growth condition also affects the plants productivity. However, in both environments the transgenic plants produced longer ears than the non transgenic control plants. The constructs had efficacy to improve ear related traits at T0 were advanced to T1 reproductive assay under either limited nitrogen source, e.g. 4 mM nitrate or limited water conditions, e.g., 25% of water application for further ear related trait evaluation. Ear growth is reduced in maize under stressed environments, such as drought and low nitrogen stress or nutrient deficiency, which ultimately contribute to grain yield reduction. The prolificacy of the Bacterial MFS transgenic plants offers opportunities to improve yield under the stressed growth environments.

[0008] There is a continuing need for modulation of remobilization in plants for manipulating plant development or biomass. This disclosure relates to the creation of Bacterial MFS polynucleotide constructs to modulate yield as seed and/or biomass, abiotic stress tolerance, including density tolerance, drought tolerance, low nitrogen stress, nitrogen utilization efficiency and/or other modifications in plants, including polynucleotide sequences, expression cassettes, constructs, vectors, plant cells and resultant plants. These and other features of the disclosure will become apparent upon review of the following.

[0009] This disclosure provides methods and compositions for modulating yield, drought tolerance, low nitrogen stress and/or nitrogen utilization efficiency in plants as well as speeding up remobilization of nutrients including nitrogen in plants. This disclosure relates to compositions and methods for modulating the level and/or activity of Bacterial MFS in plants, exemplified by, e.g., SEQ ID 4: 186470958 from Burkholderia phymatum STM815, SEQ ID 19: 220921692 from Methylobacterium nodulans ORS 2060, SEQ ID 35: 228947460 from Bacillus thuringiensis serovar monterrey BGSC 4AJ1 and SEQ ID 38: 229538083 from Planctomyces limnophilus DSM 3776, for creation of plants with improved yield and/or improved abiotic stress tolerance, which may include improved drought tolerance, improved density tolerance, enhanced yield or nitrogen (fertilizer) response in yield under high nitrogen (current commercial hybrids level off of the yield at high fertilizer application) and/or improved NUE (nitrogen utilization efficiency). NUE includes both improved yield in low nitrogen conditions and more efficient nitrogen utilization in normal conditions.

[0010] Therefore, in one aspect, the present disclosure relates to an isolated nucleic acid comprising a polynucleotide sequence which modulates Bacterial MFS expression. One embodiment of the disclosure is an isolated polynucleotide comprising a nucleotide sequence of SEQ ID NO: 4, 19, 35 or 38.

[0011] In another aspect, the present disclosure relates to recombinant constructs comprising the polynucleotides as described (see, SEQ ID NO: 4, 19, 35 and 38). The constructs generally comprise the polynucleotides of SEQ ID NO: 4, 19, 35 or SEQ ID NO: 38 and a promoter operably linked to the same. Additionally, the constructs include several features which facilitate modulation of Bacterial MFS expression. The disclosure also relates to a vector containing the recombinant expression cassette. Further, the vector containing the recombinant expression cassette can facilitate the transcription of the nucleic acid in a host cell. The present disclosure also relates to the host cells able to transcribe a polynucleotide.

[0012] In certain embodiments, the present disclosure is directed to a transgenic plant or plant cell containing a polynucleotide comprising the construct. In certain embodiments, a plant cell of the disclosure is from a dicot or monocot. Preferred plants containing the polynucleotides include, but are not limited to, maize, soybean, sunflower, sorghum, canola, wheat, alfalfa, cotton, rice, barley, tomato and millet. In certain embodiments, the transgenic plant is a maize plant or plant cell. A transgenic seed comprising a transgenic construct as described herein is an embodiment. In one embodiment, the plant cell is in a hybrid plant comprising a drought tolerance phenotype and/or a nitrogen utilization efficiency phenotype and/or an improved yield phenotype. In another embodiment, the plant cell is in a plant comprising a sterility phenotype, e.g., a male sterility phenotype. Plants may comprise a combination of such phenotypes. A plant regenerated from a plant cell of the disclosure is also a feature of the disclosure.

[0013] Certain embodiments have improved drought tolerance as compared to a control plant. The improved drought tolerance of a plant of the disclosure may reflect physiological aspects such as, but not limited to, (a) an increase in the production of at least one MFS-encoding polynucleotide; (b) an increase in the production of a Bacterial MFS polypeptide; (c) changes in ear tissue development rate; (d) an increase in sink capacity; (e) an increase in plant tissue growth or (f) any combination of (a)-(e), compared to a corresponding control plant. Plants exhibiting improved drought tolerance may also exhibit one or more additional abiotic stress tolerance phenotyopes, such as improved nitrogen utilization efficiency and increased density tolerance.

[0014] The disclosure also provides methods using nitrate transporter expression for increasing yield component expression in a plant and plants produced by such methods. For example, a method of increasing Bacterial MFS production comprises increasing the expression of one or more Bacterial MFS genes in the plant, wherein the one or more Bacterial MFS genes encode one or more transporter. Multiple methods and/or multiple constructs may be used to increase a single transporter polynucleotide or polypeptide. Multiple Bacterial MFS polynucleotides or polypeptides may be increased in a plant by a single method or by multiple methods; in either case, one or more compositions may be employed.

[0015] Methods for modulating drought tolerance in plants are also a feature of the disclosure, as are plants produced by such methods. For example, a method of modulating drought tolerance comprises: (a) selecting at least one Bacterial MFS gene to impact, thereby providing at least one desired Bacterial MFS gene; (b) introducing a mutant form of the at least one desired Bacterial MFS gene into the plant and (c) expressing the mutant form, thereby modulating drought tolerance in the plant. In certain embodiments, the mutant gene is introduced by Agrobacterium-mediated transfer, electroporation, micro-projectile bombardment, a sexual cross or the like.

[0016] Detection of expression products is performed either qualitatively (by detecting presence or absence of one or more product of interest) or quantitatively (by monitoring the level of expression of one or more product of interest). In one embodiment, the expression product is an RNA expression product. Aspects of the disclosure optionally include monitoring an expression level of a nucleic acid, polypeptide or chemical, seed production, senesence, dry down rate, etc., in a plant or in a population of plants.

[0017] Kits which incorporate one or more of the nucleic acids noted above are also a feature of the disclosure. Such kits can include any of the above noted components and further include, e.g., instructions for use of the components in any of the methods noted herein, packaging materials and/or containers for holding the components. For example, a kit for detection of Bacterial MFS expression levels in a plant includes at least one polynucleotide sequence comprising a nucleic acid sequence, where the nucleic acid sequence is, e.g., at least about 70%, at least about 75%, at least about 80%, at least about 85%, at least about 90%, at least about 95%, at least about 99%, about 99.5% or more, identical to SEQ ID NO: 4, 19, 35, or 38 or a subsequence thereof or a complement thereof. The subsequence may be SEQ ID NO: 127-135 or 121-126 or 105-106. In a further embodiment, the kit includes instructional materials for the use of the at least one polynucleotide sequence to modulate drought tolerance in a plant.

### BRIEF DESCRIPTION OF THE DRAWINGS

[0018] FIG. 1: Dendrogram illustrating the relationship among the 52 MFS polypeptides of this disclosure from various bacterial species.

[0019] FIG. 2 (as FIG. 2a-FIG. 2q) Sequence alignment of 52 MFS polypeptides from various bacterial species.

[0020] FIG. 3: Effects of transgenic NRT2.2 (BP) (SEQ ID: 4) on plant ear related traits under 75% water reduction at T1 generation. Three events of PHP50688 (ZmRM2:ADHI Intron:NRT2.2 (BP) with 1-2 copy of transgene were selected for T1 water use efficiency (WUE) reproductive assay under limited water application. The following traits were measured: ear area (cm²), ear length (cm), ear width (cm), and silk count. Trangenic positive plants tend to have increased ear area, ear length, ear width, and/or silk numbers compared to non-transgenic nulls. Asterisks indicate significance at p<0.1.

[0021] FIG. 4 (as FIG. 4a-FIG. 4d) Effects of transgenic plants expressing bacterial MFS genes on plant ear related traits under 4 mM nitrate conditions at T1 generation. T1 nitrogen use efficiency (NUE) reproductive assay was conducted on transgenic plants carrying PHP50688 (ZmRM2:ADHI Intron:NRT2.2 (BP) (FIG. 4a), PHP50692 (ZmRM2:ADHI Intron:NRT2.1 (MN) (FIG. 4b), PHP50693 (ZmRM2:ADHI Intron:NRT2.1 (BP) (FIG. 4c), or PHP50697 (ZmRM2:ADHI Intron:NRT2.1 (PL) (FIG. 4d). Three events with 1-2 copy of transgene from each construct were selected for T1 reproductive assay under limited nitrate application (4 mM nitrate). The following traits were measured: ear area (cm²), ear length (cm), ear width (cm), and silk count. Trangenic positive plants tend to have increased ear area, ear length, ear width, and/or silk numbers compared to non-transenic nulls. Asterisks indicate significance at p<0.1.

[0022] FIG. 5: Dendrogram illustrating the clade Genus/Family of the 6 MFS polypeptides showed efficacy on ear traits at T0 generation.

[0023] FIG. 6 (as FIG. 6a-FIG. 6p): Sequence alignment of 31 identified MFS polypeptides from 6 clades Genus/Family.

[0024] FIG. 7: The cartoon representation of NarK (PDB:4iu8). Left panel (FIG. 7a) is a view from cytoplasm while right panel (FIG. 7b) is a view in membrane plane. Bound NO3 is represented by a 4 ball shaped model in left panel, while the key binding site residues are showed with arrow in right panel.

### DETAILED DESCRIPTION

[0025] It is to be understood that the terminology used herein is for the purpose of describing particular embodiments only and is not intended to be limiting. As used in this specification and the appended claims, the singular forms “a”, “an” and “the” include plural references unless the content clearly dictates otherwise. Thus, for example, reference to “a cell” includes a combination of two or more cells, and the like.

[0026] Unless described otherwise, all technical and scientific terms used herein have the same meaning as commonly understood by one of ordinary skill in the art to which the disclosure pertains. Unless mentioned otherwise, the techniques employed or contemplated herein are standard methodologies well known to one of ordinary skill in the art. The materials, methods and examples are illustrative only and not limiting. The following is presented by way of illustration and is not intended to limit the scope of the disclosure.

[0027] The present disclosures now will be described more fully hereinafter with reference to the accompanying drawings, in which some, but not all embodiments of the disclosure are shown. Indeed, these disclosures may be embodied in many different forms and should not be construed as limited to the embodiments set forth herein; rather, these embodiments are provided so that this disclosure will satisfy applicable legal requirements. Like numbers refer to like elements throughout.

[0028] Many modifications and other embodiments of the disclosures set forth herein will come to mind to one skilled in the art to which these disclosures pertain having the benefit of the teachings presented in the foregoing descriptions and the associated drawings. Therefore, it is to be understood that the disclosures are not to be limited to the specific embodiments disclosed and that modifications and other embodiments are intended to be included within the scope of the appended claims. Although specific terms are employed herein, they are used in a generic and descriptive sense only and not for purposes of limitation.

[0029] The practice of the present disclosure will employ, unless otherwise indicated, conventional techniques of botany, microbiology, tissue culture, molecular biology, chemistry, biochemistry and recombinant DNA technology, which are within the skill of the art. Such techniques are explained fully in the literature. See, e.g., Langenheim and Thimann, (1982) Botany: Plant Biology and Its Relation to Human Affairs, John Wiley; Cell Culture and Somatic Cell Genetics of Plants, vol. 1, Vasil, ed. (1984); Stanier, et al., (1986) The Microbial World, 5th ed., Prentice-Hall; Dhringra and Sinclair, (1985) Basic Plant Pathology Methods, CRC Press; Maniatis, et al., (1982) Molecular Cloning: A Laboratory Manual; DNA Cloning, vols. I and II, Glover, ed. (1985); Oligonucleotide Synthesis, Gait, ed. (1984); Nucleic Acid Hybridization, Hames and Higgins, eds. (1984) and the series Methods in Enzymology, Colowick and Kaplan, eds, Academic Press, Inc., San Diego, Calif.

[0030] Units, prefixes and symbols may be denoted in their SI accepted form. Unless otherwise indicated, nucleic acids are written left to right in 5′ to 3′ orientation; amino acid sequences are written left to right in amino to carboxy orientation, respectively. Numeric ranges are inclusive of the numbers defining the range. Amino acids may be referred to herein by either their commonly known three letter symbols or by the one-letter symbols recommended by the IUPAC-IUB Biochemical Nomenclature Commission. Nucleotides, likewise, may be referred to by their commonly accepted single-letter codes. The terms defined below are more fully defined by reference to the specification as a whole.

[0031] In describing the present disclosure, the following terms will be employed and are intended to be defined as indicated below.

[0032] By “microbe” is meant any microorganism (including both eukaryotic and prokaryotic microorganisms), such as fungi, yeast, bacteria, actinomycetes, algae and protozoa, as well as other unicellular structures.

[0033] By “amplified” is meant the construction of multiple copies of a nucleic acid sequence or multiple copies complementary to the nucleic acid sequence using at least one of the nucleic acid sequences as a template. Amplification systems include the polymerase chain reaction (PCR) system, ligase chain reaction (LCR) system, nucleic acid sequence based amplification (NASBA, Cangene, Mississauga, Ontario), Q-Beta Replicase systems, transcription-based amplification system (TAS) and strand displacement amplification (SDA). See, e.g., Diagnostic Molecular Microbiology: Principles and Applications, Persing, et al., eds., American Society for Microbiology, Washington, DC (1993). The product of amplification is termed an amplicon.

[0034] The term “conservatively modified variants” applies to both amino acid and nucleic acid sequences. With respect to particular nucleic acid sequences, conservatively modified variants refer to those nucleic acids that encode identical or conservatively modified variants of the amino acid sequences. Because of the degeneracy of the genetic code, a large number of functionally identical nucleic acids encode any given protein. For instance, the codons GCA, GCC, GCG and GCU all encode the amino acid alanine. Thus, at every position where an alanine is specified by a codon, the codon can be altered to any of the corresponding codons described without altering the encoded polypeptide. Such nucleic acid variations are “silent variations” and represent one species of conservatively modified variation. Every nucleic acid sequence herein that encodes a polypeptide also describes every possible silent variation of the nucleic acid. One of ordinary skill will recognize that each codon in a nucleic acid (except AUG, which is ordinarily the only codon for methionine; one exception is Micrococcus rubens, for which GTG is the methionine codon (Ishizuka, et al., (1993) J. Gen. Microbiol. 139:425-32) can be modified to yield a functionally identical molecule. Accordingly, each silent variation of a nucleic acid, which encodes a polypeptide of the present disclosure, is implicit in each described polypeptide sequence and incorporated herein by reference.

[0035] As to amino acid sequences, one of skill will recognize that individual substitutions, deletions or additions to a nucleic acid, peptide, polypeptide or protein sequence which alters, adds or deletes a single amino acid or a small percentage of amino acids in the encoded sequence is a “conservatively modified variant” when the alteration results in the substitution of an amino acid with a chemically similar amino acid. Thus, any number of amino acid residues selected from the group of integers consisting of from 1 to 15 can be so altered. Thus, for example, 1, 2, 3, 4, 5, 7 or 10 alterations can be made. Conservatively modified variants typically provide similar biological activity as the unmodified polypeptide sequence from which they are derived. For example, substrate specificity, enzyme activity, or ligand/receptor binding is generally at least 30%, 40%, 50%, 60%, 70%, 80% or 90%, preferably 60-90% of the native protein for it's native substrate. Conservative substitution tables providing functionally similar amino acids are well known in the art.

[0036] The following six groups each contain amino acids that are conservative substitutions for one another:

[0037] 1) Alanine (A), Serine (S), Threonine (T);
[0038] 2) Aspartic acid (D), Glutamic acid (E);
[0039] 3) Asparagine (N), Glutamine (Q);

[0040] 4) Arginine (R), Lysine (K);
[0041] 5) Isoleucine (I), Leucine (L), Methionine (M), Valine (V); and
[0042] 6) Phenylalanine (F), Tyrosine (Y), Tryptophan (W).

[0043] See also, Creighton, Proteins, W.H. Freeman and Co. (1984).

[0044] As used herein, “consisting essentially of” means the inclusion of additional sequences to an object polynucleotide where the additional sequences do not selectively hybridize, under stringent hybridization conditions, to the same cDNA as the polynucleotide and where the hybridization conditions include a wash step in 0.1×SSC and 0.1% sodium dodecyl sulfate at 65° C.

[0045] By “encoding” or “encoded,” with respect to a specified nucleic acid, is meant comprising the information for translation into the specified protein. A nucleic acid encoding a protein may comprise non-translated sequences (e.g., introns) within translated regions of the nucleic acid or may lack such intervening non-translated sequences (e.g., as in cDNA). The information by which a protein is encoded is specified by the use of codons. Typically, the amino acid sequence is encoded by the nucleic acid using the “universal” genetic code. However, variants of the universal code, such as is present in some plant, animal, and fungal mitochondria, the bacterium Mycoplasma capricolum (Yamao, et al., (1985) Proc. Natl. Acad. Sci. USA 82:2306-9) or the ciliate Macronucleus, may be used when the nucleic acid is expressed using these organisms.

[0046] When the nucleic acid is prepared or altered synthetically, advantage can be taken of known codon preferences of the intended host where the nucleic acid is to be expressed. For example, although nucleic acid sequences of the present disclosure may be expressed in both monocotyledonous and dicotyledonous plant species, sequences can be modified to account for the specific codon preferences and GC content preferences of monocotyledonous plants or dicotyledonous plants as these preferences have been shown to differ (Murray, et al., (1989) Nucleic Acids Res. 17:477-98 and herein incorporated by reference). Thus, the maize preferred codon for a particular amino acid might be derived from known gene sequences from maize. Maize codon usage for 28 genes from maize plants is listed in Table 4 of Murray, et al., supra.

[0047] As used herein, “heterologous” in reference to a nucleic acid is a nucleic acid that originates from a foreign species, or, if from the same species, is substantially modified from its native form in composition and/or genomic locus by deliberate human intervention. For example, a promoter operably linked to a heterologous structural gene is from a species different from that from which the structural gene was derived or, if from the same species, one or both are substantially modified from their original form. A heterologous protein may originate from a foreign species or, if from the same species, is substantially modified from its original form by deliberate human intervention.

[0048] By “host cell” is meant a cell, which comprises a heterologous nucleic acid sequence of the disclosure, which contains a vector and supports the replication and/or expression of the expression vector. Host cells may be prokaryotic cells such as E. coli, or eukaryotic cells such as yeast, insect, plant, amphibian or mammalian cells. Preferably, host cells are monocotyledonous or dicotyledonous plant cells, including but not limited to maize, sorghum, sunflower, soybean, wheat, alfalfa, rice, cotton, canola, barley, millet and tomato. A particularly preferred monocotyledonous host cell is a maize host cell.

[0049] The term “hybridization complex” includes reference to a duplex nucleic acid structure formed by two single-stranded nucleic acid sequences selectively hybridized with each other.

[0050] The term “introduced” in the context of inserting a nucleic acid into a cell, means “transfection” or “transformation” or “transduction” and includes reference to the incorporation of a nucleic acid into a eukaryotic or prokaryotic cell where the nucleic acid may be incorporated into the genome of the cell (e.g., chromosome, plasmid, plastid or mitochondrial DNA), converted into an autonomous replicon or transiently expressed (e.g., transfected mRNA).

[0051] The terms “isolated” refers to material, such as a nucleic acid or a protein, which is substantially or essentially free from components which normally accompany or interact with it as found in its naturally occurring environment. The isolated material optionally comprises material not found with the material in its natural environment. Nucleic acids, which are “isolated”, as defined herein, are also referred to as “heterologous” nucleic acids. Unless otherwise stated, the term “nitrate uptake-associated nucleic acid” means a nucleic acid comprising a polynucleotide (“nitrate uptake-associated polynucleotide”) encoding a full length or partial length nitrate uptake-associated polypeptide.

[0052] As used herein, “nucleic acid” includes reference to a deoxyribonucleotide or ribonucleotide polymer in either single- or double-stranded form, and unless otherwise limited, encompasses known analogues having the essential nature of natural nucleotides in that they hybridize to single-stranded nucleic acids in a manner similar to naturally occurring nucleotides (e.g., peptide nucleic acids).

[0053] By “nucleic acid library” is meant a collection of isolated DNA or RNA molecules, which comprise and substantially represent the entire transcribed fraction of a genome of a specified organism. Construction of exemplary nucleic acid libraries, such as genomic and cDNA libraries, is taught in standard molecular biology references such as Berger and Kimmel, (1987) Guide To Molecular Cloning Techniques, from the series Methods in Enzymology, vol. 152, Academic Press, Inc., San Diego, Calif.; Sambrook, et al., (1989) Molecular Cloning: A Laboratory Manual, 2^{nd} ed., vols. 1-3; and Current Protocols in Molecular Biology, Ausubel, et al., eds, Current Protocols, a joint venture between Greene Publishing Associates, Inc. and John Wiley & Sons, Inc. (1994 Supplement).

[0054] As used herein “operably linked” includes reference to a functional linkage between a first sequence, such as a promoter, and a second sequence, wherein the promoter sequence initiates and mediates transcription of the DNA corresponding to the second sequence. Generally, operably linked means that the nucleic acid sequences being linked are contiguous and, where necessary to join two protein coding regions, contiguous and in the same reading frame.

[0055] As used herein, the term “plant” includes reference to whole plants, plant organs (e.g., leaves, stems, roots, etc.), seeds and plant cells and progeny of same. Plant cell, as used herein includes, without limitation, seeds, suspension cultures, embryos, meristematic regions, callus tissue, leaves, roots, shoots, gametophytes, sporophytes, pollen and microspores. The class of plants, which can be used in the methods of the disclosure, is generally as broad as the class of higher plants amenable to transformation techniques, including both monocotyledonous and dicotyledonous plants including species from the genera: Cucurbita, Rosa, Vitis, Juglans, Fragaria, Lotus, Medicago, Onobrychis, Trifolium, Trigonella, Vigna, Citrus, Linum, Geranium, Manihot, Daucus, Arabidopsis, Brassica, Raphanus, Sinapis, Atropa, Capsicum, Datura, Hyoscyamus, Lycopersicon, Nicotiana, Solanum, Petunia, Digitalis, Majorana, Ciahorium, Helianthus, Lactuca, Bromus, Asparagus, Antirrhinum, Heterocallis, Nemesis, Pelargonium, Panieum, Pennisetum, Ranunculus, Senecio, Salpiglossis, Cucumis, Browaalia, Glycine, Pisum, Phaseolus, Lolium, Oryza, Avena, Hordeum, Secale, Allium and Triticum. A particularly preferred plant is Zea mays.

[0056] As used herein, “yield” may include reference to bushels per acre of a grain crop at harvest, as adjusted for grain moisture (15% typically for maize, for example) and the volume of biomass generated (for forage crops such as alfalfa and plant root size for multiple crops). Grain moisture is measured in the grain at harvest. The adjusted test weight of grain is determined to be the weight in pounds per bushel, adjusted for grain moisture level at harvest. Biomass is measured as the weight of harvestable plant material generated.

[0057] As used herein, “polynucleotide” includes reference to a deoxyribopolynucleotide, ribopolynucleotide or analogs thereof that have the essential nature of a natural ribonucleotide in that they hybridize, under stringent hybridization conditions, to substantially the same nucleotide sequence as naturally occurring nucleotides and/or allow translation into the same amino acid(s) as the naturally occurring nucleotide(s). A polynucleotide can be full-length or a subsequence of a native or heterologous structural or regulatory gene. Unless otherwise indicated, the term includes reference to the specified sequence as well as the complementary sequence thereof. Thus, DNAs or RNAs with backbones modified for stability or for other reasons are “polynucleotides” as that term is intended herein. Moreover, DNAs or RNAs comprising unusual bases, such as inosine or modified bases, such as tritylated bases, to name just two examples, are polynucleotides as the term is used herein. It will be appreciated that a great variety of modifications have been made to DNA and RNA that serve many useful purposes known to those of skill in the art. The term polynucleotide as it is employed herein embraces such chemically, enzymatically or metabolically modified forms of polynucleotides, as well as the chemical forms of DNA and RNA characteristic of viruses and cells, including inter alia, simple and complex cells.

[0058] The terms “polypeptide,” “peptide” and “protein” are used interchangeably herein to refer to a polymer of amino acid residues. The terms apply to amino acid polymers in which one or more amino acid residue is an artificial chemical analogue of a corresponding naturally occurring amino acid, as well as to naturally occurring amino acid polymers.

[0059] As used herein “promoter” includes reference to a region of DNA upstream from the start of transcription and involved in recognition and binding of RNA polymerase and other proteins to initiate transcription. A “plant promoter” is a promoter capable of initiating transcription in plant cells. Exemplary plant promoters include, but are not limited to, those that are obtained from plants, plant viruses and bacteria which comprise genes expressed in plant cells such Agrobacterium or Rhizobium. Examples are promoters that preferentially initiate transcription in certain tissues, such as leaves, roots, seeds, fibres, xylem vessels, tracheids or sclerenchyma. Such promoters are referred to as “tissue preferred.” A “cell type” specific promoter primarily drives expression in certain cell types in one or more organs, for example, vascular cells in roots or leaves. An “inducible” or “regulatable” promoter is a promoter, which is under environmental control. Examples of environmental conditions that may effect transcription by inducible promoters include anaerobic conditions or the presence of light. Another type of promoter is a developmentally regulated promoter, for example, a promoter that drives expression during pollen development. Tissue preferred, cell type specific, developmentally regulated and inducible promoters constitute the class of “non-constitutive” promoters. A “constitutive” promoter is a promoter, which is active under most environmental conditions.

[0060] The term “nitrate uptake-associated polypeptide” refers to one or more amino acid sequences. The term is also inclusive of fragments, variants, homologs, alleles or precursors (e.g., preproproteins or proproteins) thereof. A “nitrate uptake-associated protein” comprises a nitrate uptake-associated polypeptide. Unless otherwise stated, the term “nitrate uptake-associated nucleic acid” means a nucleic acid comprising a polynucleotide (“nitrate uptake-associated polynucleotide”) encoding a nitrate uptake-associated polypeptide.

[0061] As used herein “recombinant” includes reference to a cell or vector, that has been modified by the introduction of a heterologous nucleic acid or that the cell is derived from a cell so modified. Thus, for example, recombinant cells express genes that are not found in identical form within the native (non-recombinant) form of the cell or express native genes that are otherwise abnormally expressed, under expressed or not expressed at all as a result of deliberate human intervention or may have reduced or eliminated expression of a native gene.

[0062] The term “recombinant” as used herein does not encompass the alteration of the cell or vector by naturally occurring events (e.g., spontaneous mutation, natural transformation/transduction/transposition) such as those occurring without deliberate human intervention.

[0063] As used herein, a “recombinant expression cassette” is a nucleic acid construct, generated recombinantly or synthetically, with a series of specified nucleic acid elements, which permit transcription of a particular nucleic acid in a target cell. The recombinant expression cassette can be incorporated into a plasmid, chromosome, mitochondrial DNA, plastid DNA, virus or nucleic acid fragment. Typically, the recombinant expression cassette portion of an expression vector includes, among other sequences, a nucleic acid to be transcribed and a promoter.

[0064] The terms “residue” or “amino acid residue” or “amino acid” are used interchangeably herein to refer to an amino acid that is incorporated into a protein, polypeptide or peptide (collectively “protein”). The amino acid may be a naturally occurring amino acid and, unless otherwise limited, may encompass known analogs of natural amino acids that can function in a similar manner as naturally occurring amino acids.

[0065] The term “selectively hybridizes” includes reference to hybridization, under stringent hybridization conditions, of a nucleic acid sequence to a specified nucleic acid target sequence to a detectably greater degree (e.g., at least 2-fold over background) than its hybridization to non-target nucleic acid sequences and to the substantial exclusion of non-target nucleic acids. Selectively hybridizing sequences typically have about at least 40% sequence identity, preferably 60-90% sequence identity and most preferably 100% sequence identity (i.e., complementary) with each other.

[0066] The terms “stringent conditions” or “stringent hybridization conditions” include reference to conditions under which a probe will hybridize to its target sequence, to a detectably greater degree than other sequences (e.g., at least 2-fold over background). Stringent conditions are sequence-dependent and will be different in different circumstances. By controlling the stringency of the hybridization and/or washing conditions, target sequences can be identified which can be up to 100% complementary to the probe (homologous probing). Alternatively, stringency conditions can be adjusted to allow some mismatching in sequences so that lower degrees of similarity are detected (heterologous probing). Optimally, the probe is approximately 500 nucleotides in length, but can vary greatly in length from less than 500 nucleotides to equal to the entire length of the target sequence.

[0067] Typically, stringent conditions will be those in which the salt concentration is less than about 1.5 M Na ion, typically about 0.01 to 1.0 M Na ion concentration (or other salts) at pH 7.0 to 8.3 and the temperature is at least about 30° C. for short probes (e.g., 10 to 50 nucleotides) and at least about 60° C. for long probes (e.g., greater than 50 nucleotides). Stringent conditions may also be achieved with the addition of destabilizing agents such as formamide or Denhardt's. Exemplary low stringency conditions include hybridization with a buffer solution of 30 to 35% formamide, 1 M NaCl, 1% SDS (sodium dodecyl sulphate) at 37° C. and a wash in 1× to 2×SSC (20×SSC=3.0 M NaCl/0.3 M trisodium citrate) at 50 to 55° C. Exemplary moderate stringency conditions include hybridization in 40 to 45% formamide, 1 M NaCl, 1% SDS at 37° C. and a wash in 0.5× to 1×SSC at 55 to 60° C. Exemplary high stringency conditions include hybridization in 50% formamide, 1 M NaCl, 1% SDS at 37° C. and a wash in 0.1×SSC at 60 to 65° C. Specificity is typically the function of post-hybridization washes, the critical factors being the ionic strength and temperature of the final wash solution. For DNA-DNA hybrids, the Tₘ can be approximated from the equation of Meinkoth and Wahl, (1984) Anal. Biochem., 138:267-84: Tₘ=81.5° C.+16.6 (log M)+0.41 (% GC)−0.61 (% form)−500/L; where M is the molarity of monovalent cations, % GC is the percentage of guanosine and cytosine nucleotides in the DNA, % form is the percentage of formamide in the hybridization solution, and L is the length of the hybrid in base pairs. The Tₘ is the temperature (under defined ionic strength and pH) at which 50% of a complementary target sequence hybridizes to a perfectly matched probe. Tₘ is reduced by about 1° C. for each 1% of mismatching; thus, Tₘ, hybridization and/or wash conditions can be adjusted to hybridize to sequences of the desired identity. For example, if sequences with >90% identity are sought, the Tₘ can be decreased 10° C. Generally, stringent conditions are selected to be about 5° C. lower than the thermal melting point (Tₘ) for the specific sequence and its complement at a defined ionic strength and pH. However, severely stringent conditions can utilize a hybridization and/or wash at 1, 2, 3 or 4° C. lower than the thermal melting point (Tₘ); moderately stringent conditions can utilize a hybridization and/or wash at 6, 7, 8, 9 or 10° C. lower than the thermal melting point (Tₘ); low stringency conditions can utilize a hybridization and/or wash at 11, 12, 13, 14, 15 or 20° C. lower than the thermal melting point (Tₘ). Using the equation, hybridization and wash compositions, and desired Tₘ, those of ordinary skill will understand that variations in the stringency of hybridization and/or wash solutions are inherently described. If the desired degree of mismatching results in a Tₘ of less than 45° C. (aqueous solution) or 32° C. (formamide solution) it is preferred to increase the SSC concentration so that a higher temperature can be used. An extensive guide to the hybridization of nucleic acids is found in Tijssen, Laboratory Techniques in Biochemistry and Molecular Biology—Hybridization with Nucleic Acid Probes, part I, chapter 2, “Overview of principles of hybridization and the strategy of nucleic acid probe assays,” Elsevier, New York (1993); and Current Protocols in Molecular Biology, chapter 2, Ausubel, et al., eds, Greene Publishing and Wiley-Interscience, New York (1995). Unless otherwise stated, in the present application high stringency is defined as hybridization in 4×SSC, 5×Denhardt's (5 g Ficoll, 5 g polyvinypyrrolidone, 5 g bovine serum albumin in 500 ml of water), 0.1 mg/ml boiled salmon sperm DNA and 25 mM Na phosphate at 65° C. and a wash in 0.1×SSC, 0.1% SDS at 65° C.

[0068] As used herein, “transgenic plant” includes reference to a plant, which comprises within its genome a heterologous polynucleotide. Generally, the heterologous polynucleotide is stably integrated within the genome such that the polynucleotide is passed on to successive generations. The heterologous polynucleotide may be integrated into the genome alone or as part of a recombinant expression cassette. “Transgenic” is used herein to include any cell, cell line, callus, tissue, plant part or plant, the genotype of which has been altered by the presence of heterologous nucleic acid including those transgenics initially so altered as well as those created by sexual crosses or asexual propagation from the initial transgenic. The term “transgenic” as used herein does not encompass the alteration of the genome (chromosomal or extra-chromosomal) by conventional plant breeding methods or by naturally occurring events such as random cross-fertilization, non-recombinant viral infection, non-recombinant bacterial transformation, non-recombinant transposition or spontaneous mutation.

[0069] As used herein, “vector” includes reference to a nucleic acid used in transfection of a host cell and into which can be inserted a polynucleotide. Vectors are often replicons. Expression vectors permit transcription of a nucleic acid inserted therein.

[0070] The following terms are used to describe the sequence relationships between two or more nucleic acids or polynucleotides or polypeptides: (a) “reference sequence,” (b) “comparison window,” (c) “sequence identity,” (d) “percentage of sequence identity” and (e) “substantial identity.”

[0071] As used herein, “reference sequence” is a defined sequence used as a basis for sequence comparison. A reference sequence may be a subset or the entirety of a specified sequence; for example, as a segment of a full-length cDNA or gene sequence or the complete cDNA or gene sequence.

[0072] As used herein, “comparison window” means includes reference to a contiguous and specified segment of a polynucleotide sequence, wherein the polynucleotide sequence may be compared to a reference sequence and wherein the portion of the polynucleotide sequence in the comparison window may comprise additions or deletions (i.e., gaps) compared to the reference sequence (which does not comprise additions or deletions) for optimal alignment of the two sequences. Generally, the comparison window is at least 20 contiguous nucleotides in length, and optionally can be 30, 40, 50, 100 or longer. Those of skill in the art understand that to avoid a high similarity to a reference sequence due to inclusion of gaps in the polynucleotide sequence a gap penalty is typically introduced and is subtracted from the number of matches.

[0073] Methods of alignment of nucleotide and amino acid sequences for comparison are well known in the art. The local homology algorithm (BESTFIT) of Smith and Waterman, (1981) Adv. Appl. Math 2:482, may conduct optimal alignment of sequences for comparison; by the homology alignment algorithm (GAP) of Needleman and Wunsch, (1970) J. Mol. Biol. 48:443-53; by the search for similarity method (Tfasta and Fasta) of Pearson and Lipman, (1988) Proc. Natl. Acad. Sci. USA 85:2444; by computerized implementations of these algorithms, including, but not limited to: CLUSTAL in the PC/Gene program by Intelligenetics, Mountain View, Calif., GAP, BESTFIT, BLAST, FASTA and TFASTA in the Wisconsin Genetics Software Package, Version 8 (available from Genetics Computer Group (GCG® programs (Accelrys, Inc., San Diego, Calif.).). The CLUSTAL program is well described by Higgins and Sharp, (1988) Gene 73:237-44; Higgins and Sharp, (1989) CABIOS 5:151-3; Corpet, et al., (1988) Nucleic Acids Res. 16:10881-90; Huang, et al., (1992) Computer Applications in the Biosciences 8:155-65 and Pearson, et al., (1994) Meth. Mol. Biol. 24:307-31. The preferred program to use for optimal global alignment of multiple sequences is PileUp (Feng and Doolittle, (1987) J. Mol. Evol., 25:351-60 which is similar to the method described by Higgins and Sharp, (1989) CABIOS 5:151-53 and hereby incorporated by reference). The BLAST family of programs which can be used for database similarity searches includes: BLASTN for nucleotide query sequences against nucleotide database sequences; BLASTX for nucleotide query sequences against protein database sequences; BLASTP for protein query sequences against protein database sequences; TBLASTN for protein query sequences against nucleotide database sequences and TBLASTX for nucleotide query sequences against nucleotide database sequences. See, Current Protocols in Molecular Biology, Chapter 19, Ausubel et al., eds., Greene Publishing and Wiley-Interscience, New York (1995).

[0074] GAP uses the algorithm of Needleman and Wunsch, supra, to find the alignment of two complete sequences that maximizes the number of matches and minimizes the number of gaps. GAP considers all possible alignments and gap positions and creates the alignment with the largest number of matched bases and the fewest gaps. It allows for the provision of a gap creation penalty and a gap extension penalty in units of matched bases. GAP must make a profit of gap creation penalty number of matches for each gap it inserts. If a gap extension penalty greater than zero is chosen, GAP must, in addition, make a profit for each gap inserted of the length of the gap times the gap extension penalty. Default gap creation penalty values and gap extension penalty values in Version 10 of the Wisconsin Genetics Software Package are 8 and 2, respectively. The gap creation and gap extension penalties can be expressed as an integer selected from the group of integers consisting of from 0 to 100. Thus, for example, the gap creation and gap extension penalties can be 0, 1, 2, 3, 4, 5, 6, 7, 8, 9, 10, 15, 20, 30, 40, 50 or greater.

[0075] GAP presents one member of the family of best alignments. There may be many members of this family, but no other member has a better quality. GAP displays four figures of merit for alignments: Quality, Ratio, Identity and Similarity. The Quality is the metric maximized in order to align the sequences. Ratio is the quality divided by the number of bases in the shorter segment. Percent Identity is the percent of the symbols that actually match. Percent Similarity is the percent of the symbols that are similar. Symbols that are across from gaps are ignored. A similarity is scored when the scoring matrix value for a pair of symbols is greater than or equal to 0.50, the similarity threshold. The scoring matrix used in Version 10 of the Wisconsin Genetics Software Package is BLOSUM62 (see, Henikoff and Henikoff, (1989) Proc. Natl. Acad. Sci. USA 89:10915).

[0076] Unless otherwise stated, sequence identity/similarity values provided herein refer to the value obtained using the BLAST 2.0 suite of programs using default parameters (Altschul, et al., (1997) Nucleic Acids Res. 25:3389-402).

[0077] As those of ordinary skill in the art will understand, BLAST searches assume that proteins can be modeled as random sequences. However, many real proteins comprise regions of nonrandom sequences, which may be homopolymeric tracts, short-period repeats, or regions enriched in one or more amino acids. Such low-complexity regions may be aligned between unrelated proteins even though other regions of the protein are entirely dissimilar. A number of low-complexity filter programs can be employed to reduce such low-complexity alignments. For example, the SEG (Wooten and Federhen, (1993) Comput. Chem. 17:149-63) and XNU (Claverie and States, (1993) Comput. Chem. 17:191-201) low-complexity filters can be employed alone or in combination.

[0078] As used herein, “sequence identity” or “identity” in the context of two nucleic acid or polypeptide sequences includes reference to the residues in the two sequences, which are the same when aligned for maximum correspondence over a specified comparison window. When percentage of sequence identity is used in reference to proteins it is recognized that residue positions which are not identical often differ by conservative amino acid substitutions, where amino acid residues are substituted for other amino acid residues with similar chemical properties (e.g., charge or hydrophobicity) and therefore do not change the functional properties of the molecule. Where sequences differ in conservative substitutions, the percent sequence identity may be adjusted upwards to correct for the conservative nature of the substitution. Sequences, which differ by such conservative substitutions, are said to have “sequence similarity” or “similarity.” Means for making this adjustment are well known to those of skill in the art. Typically this involves scoring a conservative substitution as a partial rather than a full mismatch, thereby increasing the percentage sequence identity. Thus, for example, where an identical amino acid is given a score of 1 and a non-conservative substitution is given a score of zero, a conservative substitution is given a score between zero and 1. The scoring of conservative substitutions is calculated, e.g., according to the algorithm of Meyers and Miller, (1988) Computer Applic. Sci. 4:11-17, e.g., as implemented in the program PC/GENE (Intelligenetics, Mountain View, Calif., USA).

[0079] As used herein, “percentage of sequence identity” means the value determined by comparing two optimally aligned sequences over a comparison window, wherein the portion of the polynucleotide sequence in the comparison window may comprise additions or deletions (i.e., gaps) as compared to the reference sequence (which does not comprise additions or deletions) for optimal alignment of the two sequences. The percentage is calculated by determining the number of positions at which the identical nucleic acid base or amino acid residue occurs in both sequences to yield the number of matched positions, dividing the number of matched positions by the total number of positions in the window of comparison and multiplying the result by 100 to yield the percentage of sequence identity.

[0080] The term “substantial identity” of polynucleotide sequences means that a polynucleotide comprises a sequence that has between 50-100% sequence identity, preferably at least 50% sequence identity, preferably at least 60% sequence identity, preferably at least 70%, more preferably at least 80%, more preferably at least 90% and most preferably at least 95%, compared to a reference sequence using one of the alignment programs described using standard parameters. One of skill will recognize that these values can be appropriately adjusted to determine corresponding identity of proteins encoded by two nucleotide sequences by taking into account codon degeneracy, amino acid similarity, reading frame positioning and the like. Substantial identity of amino acid sequences for these purposes normally means sequence identity of between 55-100%, preferably at least 55%, preferably at least 60%, more preferably at least 70%, 80%, 90% and most preferably at least 95%.

[0081] Another indication that nucleotide sequences are substantially identical is if two molecules hybridize to each other under stringent conditions. The degeneracy of the genetic code allows for many amino acids substitutions that lead to variety in the nucleotide sequence that code for the same amino acid, hence it is possible that the DNA sequence could code for the same polypeptide but not hybridize to each other under stringent conditions. This may occur, e.g., when a copy of a nucleic acid is created using the maximum codon degeneracy permitted by the genetic code. One indication that two nucleic acid sequences are substantially identical is that the polypeptide, which the first nucleic acid encodes, is immunologically cross reactive with the polypeptide encoded by the second nucleic acid.

[0082] The terms “substantial identity” in the context of a peptide indicates that a peptide comprises a sequence with between 55-100% sequence identity to a reference sequence preferably at least 55% sequence identity, preferably 60% preferably 70%, more preferably 80%, most preferably at least 90% or 95% sequence identity to the reference sequence over a specified comparison window. Preferably, optimal alignment is conducted using the homology alignment algorithm of Needleman and Wunsch, supra. An indication that two peptide sequences are substantially identical is that one peptide is immunologically reactive with antibodies raised against the second peptide. Thus, a peptide is substantially identical to a second peptide, for example, where the two peptides differ only by a conservative substitution. In addition, a peptide can be substantially identical to a second peptide when they differ by a non-conservative change if the epitope that the antibody recognizes is substantially identical. Peptides, which are “substantially similar” share sequences as, noted above except that residue positions, which are not identical, may differ by conservative amino acid changes.

[0083] The disclosure discloses nitrate uptake-associated polynucleotides and polypeptides. The nucleotides and proteins of the disclosure have an expression pattern which indicates that they enhance nitrogen uptake and utilization and thus play an important role in plant development. The polynucleotides are expressed in various plant tissues. The polynucleotides and polypeptides thus provide an opportunity to manipulate plant development to alter tissue development, timing or composition. This may be used to create a plant with enhanced yield under limited nitrogen supply.

[0084] Nucleic Acids

[0085] The present disclosure provides, inter alia, isolated nucleic acids of RNA, DNA, homologs, paralogs and orthologs and/or chimeras thereof, comprising a nitrate uptake-associated polynucleotide. This includes naturally occurring as well as synthetic variants and homologs of the sequences.

[0086] Sequences homologous, i.e., that share significant sequence identity or similarity, to those provided herein derived from maize, Arabidopsis thaliana or from other plants of choice, are also an aspect of the disclosure. Homologous sequences can be derived from any plant including monocots and dicots and in particular agriculturally important plant species, including but not limited to, crops such as soybean, wheat, corn (maize), potato, cotton, rice, rape, oilseed rape (including canola), sunflower, alfalfa, clover, sugarcane, and turf or fruits and vegetables, such as banana, blackberry, blueberry, strawberry and raspberry, cantaloupe, carrot, cauliflower, coffee, cucumber, eggplant, grapes, honeydew, lettuce, mango, melon, onion, papaya, peas, peppers, pineapple, pumpkin, spinach, squash, sweet corn, tobacco, tomato, tomatillo, watermelon, rosaceous fruits (such as apple, peach, pear, cherry and plum) and vegetable brassicas (such as broccoli, cabbage, cauliflower, Brussels sprouts and kohlrabi). Other crops, including fruits and vegetables, whose phenotype can be changed and which comprise homologous sequences include barley; rye; millet; sorghum; currant; avocado; citrus fruits such as oranges, lemons, grapefruit and tangerines, artichoke, cherries; nuts such as the walnut and peanut; endive; leek; roots such as arrowroot, beet, cassaya, turnip, radish, yam and sweet potato and beans. The homologous sequences may also be derived from woody species, such pine, poplar and eucalyptus or mint or other labiates. In addition, homologous sequences may be derived from plants that are evolutionarily-related to crop plants, but which may not have yet been used as crop plants. Examples include deadly nightshade (Atropa belladona), related to tomato; jimson weed (Datura strommium), related to peyote; and teosinte (Zea species), related to corn (maize).

[0087] Orthologs and Paralogs

[0088] Homologous sequences as described above can comprise orthologous or paralogous sequences. Several different methods are known by those of skill in the art for identifying and defining these functionally homologous sequences. Three general methods for defining orthologs and paralogs are described; an ortholog, paralog or homolog may be identified by one or more of the methods described below.

[0089] Orthologs and paralogs are evolutionarily related genes that have similar sequence and similar functions. Orthologs are structurally related genes in different species that are derived by a speciation event. Paralogs are structurally related genes within a single species that are derived by a duplication event.

[0090] Within a single plant species, gene duplication may cause two copies of a particular gene, giving rise to two or more genes with similar sequence and often similar function known as paralogs. A paralog is therefore a similar gene formed by duplication within the same species. Paralogs typically cluster together or in the same clade (a group of similar genes) when a gene family phylogeny is analyzed using programs such as CLUSTAL (Thompson, et al., (1994) Nucleic Acids Res. 22:4673-4680; Higgins, et al., (1996) Methods Enzymol. 266:383-402). Groups of similar genes can also be identified with pair-wise BLAST analysis (Feng and Doolittle, (1987) J. Mol. Evol. 25:351-360).

[0091] For example, a clade of very similar MADS domain transcription factors from Arabidopsis all share a common function in flowering time (Ratcliffe, et al., (2001) Plant Physiol. 126:122-132) and a group of very similar AP2 domain transcription factors from Arabidopsis are involved in tolerance of plants to freezing (Gilmour, et al., (1998) Plant J. 16:433-442). Analysis of groups of similar genes with similar function that fall within one clade can yield sub-sequences that are particular to the clade. These sub-sequences, known as consensus sequences, can not only be used to define the sequences within each clade, but define the functions of these genes; genes within a clade may contain paralogous sequences or orthologous sequences that share the same function (see also, for example, Mount, (2001) in Bioinformatics: Sequence and Genome Analysis Cold Spring Harbor Laboratory Press, Cold Spring Harbor, N.Y., page 543.)

[0092] Speciation, the production of new species from a parental species, can also give rise to two or more genes with similar sequence and similar function. These genes, termed orthologs, often have an identical function within their host plants and are often interchangeable between species without losing function. Because plants have common ancestors, many genes in any plant species will have a corresponding orthologous gene in another plant species. Once a phylogenic tree for a gene family of one species has been constructed using a program such as CLUSTAL (Thompson, et al., (1994) Nucleic Acids Res. 22:4673-4680; Higgins, et al., (1996) supra) potential orthologous sequences can be placed into the phylogenetic tree and their relationship to genes from the species of interest can be determined. Orthologous sequences can also be identified by a reciprocal BLAST strategy. Once an orthologous sequence has been identified, the function of the ortholog can be deduced from the identified function of the reference sequence.

[0093] Orthologous genes from different organisms have highly conserved functions and very often essentially identical functions (Lee, et al., (2002) Genome Res. 12:493-502; Remm, et al., (2001) J. Mol. Biol. 314:1041-1052). Paralogous genes, which have diverged through gene duplication, may retain similar functions of the encoded proteins. In such cases, paralogs can be used interchangeably with respect to certain embodiments of the instant disclosure (for example, transgenic expression of a coding sequence).

[0094] Variant Nucleotide Sequences in the Non-Coding Regions

[0095] The nitrate uptake-associated nucleotide sequences are used to generate variant nucleotide sequences having the nucleotide sequence of the 5′-untranslated region, 3′-untranslated region or promoter region that is approximately 70%, 75%, 80%, 85%, 90% and 95% identical to the original nucleotide sequence of the corresponding SEQ ID NO: 1. These variants are then associated with natural variation in the germplasm for component traits related to NUE. The associated variants are used as marker haplotypes to select for the desirable traits.

[0096] Variant Amino Acid Sequences of Nitrate Uptake-Associated Polypeptides

[0097] Variant amino acid sequences of the Nitrate uptake associated polypeptides are generated. In this example, one amino acid is altered. Specifically, the open reading frames are reviewed to determine the appropriate amino acid alteration. The selection of the amino acid to change is made by consulting the protein alignment (with the other orthologs and other gene family members from various species). An amino acid is selected that is deemed not to be under high selection pressure (not highly conserved) and which is rather easily substituted by an amino acid with similar chemical characteristics (i.e., similar functional side-chain). Using a protein alignment, an appropriate amino acid can be changed. Once the targeted amino acid is identified, the procedure outlined herein is followed. Variants having about 70%, 75%, 80%, 85%, 90% and 95% nucleic acid sequence identity are generated using this method. These variants are then associated with natural variation in the germplasm for component traits related to NUE. The associated variants are used as marker haplotypes to select for the desirable traits.

[0098] The present disclosure also includes polynucleotides optimized for expression in different organisms. For example, for expression of the polynucleotide in a maize plant, the sequence can be altered to account for specific codon preferences and to alter GC content as according to Murray, et al, supra. Maize codon usage for 28 genes from maize plants is listed in Table 4 of Murray, et al., supra.

[0099] The nitrate uptake-associated nucleic acids of the present disclosure comprise isolated nitrate uptake-associated polynucleotides which are inclusive of:

[0100] (a) a polynucleotide encoding a nitrate uptake-associated polypeptide and conservatively modified and polymorphic variants thereof;

[0101] (b) a polynucleotide having at least 70% sequence identity with polynucleotides of (a) or (b);

[0102] (c) complementary sequences of polynucleotides of (a) or (b).

[0103] The following table, Table 1, lists the specific identities of disclosed polypeptides.

TABLE 1

| Source ID | Bacterial strain | Name | SEQ ID NO: |
|---|---|---|---|
| 94311011 | Cupriavidus metallidurans CH34 | NRT2.1 (CM) | SEQ ID NO: 1 |
| 189423282 | Geobacter lovleyi SZ | NRT2.1 (GL) | SEQ ID NO: 2 |
| 189425713 | Geobacter lovleyi SZ | NRT2.2 (GL) | SEQ ID NO: 3 |
| 186470958 | Burkholderia phymatum STM815 | NRT2.2 (BP) | SEQ ID NO: 4 |
| 110679686 | Roseobacter denitrificans OCh | NRT2.1 (RD) | SEQ ID NO: 5 |
| | 114 | | |
| 167647824 | Caulobacter sp. K31 | NRT2.1 (C-K31) | SEQ ID NO: 6 |
| 25188166 | Selenomonas ruminantium | NRT2.1 (SR) | SEQ ID NO: 7 |
| 283846259 | Bacillus cellulosilyticus DSM 2522 | NRT2.1 (BC) | SEQ ID NO: 8 |
| 283845245 | Bacillus cellulosilyticus DSM 2522 | NRT2.2 (BC) | SEQ ID NO: 9 |
| 18413617 | Halomonas halodenitrificans | NRT2.2 (HH) | SEQ ID NO: 10 |
| 25027853 | Corynebacterium efficiens YS-314 | NRT2.1 (CE) | SEQ ID NO: 11 |
| 145596376 | Salinispora tropica CNB-440 | NRT2.1 (ST) | SEQ ID NO: 12 |
| 52078816 | Bacillus licheniformis ATCC | NRT2.1 (BL) | SEQ ID NO: 13 |
| | 14580 | | |
| 261406348 | Geobacillus sp. Y412MC10 | NRT2.1 (G- | SEQ ID NO: 14 |
| | | Y412MC10) | |
| 167646919 | Caulobacter sp. K31 | NRT2.2 (C-K31) | SEQ ID NO: 15 |
| 119897579 | Azoarcus sp. BH72 | NRT2.1 (A-BH72) | SEQ ID NO: 16 |
| 188991700 | Xanthomonas campestris pv. | NRT2.1 (XC) | SEQ ID NO: 17 |
| | campestris str. B100 | | |
| 146282747 | Pseudomonas stutzeri A1501 | NRT2.1 (PS) | SEQ ID NO: 18 |
| 220921692 | Methylobacterium nodulans ORS | NRT2.1 (MN) | SEQ ID NO: 19 |
| | 2060 | | |
| 186477088 | Burkholderia phymatum STM815 | NRT2.1 (BP) | SEQ ID NO: 20 |
| 145592742 | Salinispora tropica CNB-440 | NRT2.1 (ST) | SEQ ID NO: 21 |
| 25027972 | Corynebacterium efficiens YS-314 | NRT2.2 (CE) | SEQ ID NO: 22 |
| 189423281 | Geobacter lovleyi SZ | NRT2.3 (GL) | SEQ ID NO: 23 |
| 74317419 | Thiobacillus denitrificans ATCC | NRT2.1 (TD) | SEQ ID NO: 24 |
| | 25259 | | |
| 94311010 | Cupriavidus metallidurans CH34 | NRT2.2 (CM) | SEQ ID NO: 25 |
| 189425712 | Geobacter lovleyi SZ | NRT2.4 (GL) | SEQ ID NO: 26 |
| 220922117 | Methylobacterium nodulans ORS | NRT2.2 (MN) | SEQ ID NO: 27 |
| | 2060 | | |
| 167647823 | Caulobacter sp. K31 | NRT2.3 (C-K31) | SEQ ID NO: 28 |
| 18413616 | Halomonas halodenitrificans | NRT2.3 (HH) | SEQ ID NO: 29 |
| 16264170 | Sinorhizobium meliloti 1021 | NRT2.1 (SM) | SEQ ID NO: 30 |
| 119387158 | Paracoccus denitrificans PD1222 | NRT2.1 (PD) | SEQ ID NO: 31 |
| 18413620 | Halomonas halodenitrificans | NRT2.1 (HH) | SEQ ID NO: 32 |
| 227514964 | Lactobacillus fermentum ATCC | NRT2.1 (LF) | SEQ ID NO: 33 |
| | 14931 | | |
| 56962496 | Bacillus clausii KSM-K16 | NRT2.1 (BC) | SEQ ID NO: 34 |
| 228947460 | Bacillus thuringiensis serovar | NRT2.1 (BT) | SEQ ID NO: 35 |
| | monterrey BGSC 4AJ1 | | |
| 186470459 | Burkholderia phymatum STM815 | NRT2.2 (BP) | SEQ ID NO: 36 |
| 94313739 | Ralstonia metallidurans CH34 | NRT2.1 (RM) | SEQ ID NO: 37 |
| 229538083 | Planctomyces limnophilus DSM | NRT2.1 (PL) | SEQ ID NO: 38 |
| | 3776 | | |
| 255035828 | Dyadobacter fermentans DSM | NRT2.1 (DF) | SEQ ID NO: 39 |
| | 18053 | | |
| 254424960 | Synechococcus sp. PCC 7335 | NRT2.1 (S- | SEQ ID NO: 40 |
| | | PCC7335) | |
| 116071859 | Synechococcus sp. BL107 | NRT2.1 (S-BL107) | SEQ ID NO: 41 |
| 186681963 | Nostoc punctiforme PCC 73102 | NRT2.1 (NP) | SEQ ID NO: 42 |
| 254422506 | Synechococcus sp. PCC 7335 | NRT2.2 (S- | SEQ ID NO: 43 |
| | | PCC7335) | |
| 110679685 | Roseobacter denitrificans OCh | NRT2.2 (RD) | SEQ ID NO: 44 |
| | 114 | | |
| 283847378 | Bacillus cellulosilyticus DSM 2522 | NRT2.3 (BC) | SEQ ID NO: 45 |
| 170726972 | Shewanella woodyi ATCC 51908 | NRT2.2 (SW) | SEQ ID NO: 46 |
| 254428533 | Alcanivorax sp. DG881 | NRT2.1 (A- | SEQ ID NO: 47 |
| | | DG881) | |
| 254427883 | Alcanivorax sp. DG881 | NRT2.2 (A- | SEQ ID NO: 48 |
| | | DG881) | |
| 91795059 | Shewanella denitrificans OS217 | NRT2.1 (SD) | SEQ ID NO: 49 |
| 170726230 | Shewanella woodyi ATCC 51908 | NRT2.1 (SW) | SEQ ID NO: 50 |
| 89108312 | Escherichia coli W3110 | NRT2.1 (EC) | SEQ ID NO: 51 |
| P37758 | Escherichia coli K12 | NAR U | SEQ ID NO: 52 |

[0104] The following table, Table 2, lists the specific identities of disclosed polynucleotides.

TABLE 2

| Source ID | Bacterial strain | Name | SEQ ID NO: |
|---|---|---|---|
| 94311011 | Cupriavidus metallidurans | NRT2.1 (CM) | SEQ ID NO: 53 |
| | CH34 | | |
| 189423282 | Geobacter lovleyi SZ | NRT2.1 (GL) | SEQ ID NO: 54 |
| 189425713 | Geobacter lovleyi SZ | NRT2.2 (GL) | SEQ ID NO: 55 |
| 186470958 | Burkholderia phymatum | NRT2.2 (BP) | SEQ ID NO: 56 |
| | STM815 | | |
| 110679686 | Roseobacter denitrificans OCh | NRT2.1 (RD) | SEQ ID NO: 57 |
| | 114 | | |
| 167647824 | Caulobacter sp. K31 | NRT2.1 (C-K31) | SEQ ID NO: 58 |
| 25188166 | Selenomonas ruminantium | NRT2.1 (SR) | SEQ ID NO: 59 |
| 283846259 | Bacillus cellulosilyticus DSM | NRT2.1 (BC) | SEQ ID NO: 60 |
| | 2522 | | |
| 283845245 | Bacillus cellulosilyticus DSM | NRT2.2 (BC) | SEQ ID NO: 61 |
| | 2522 | | |
| 18413617 | Halomonas halodenitrificans | NRT2.2 (HH) | SEQ ID NO: 62 |
| 25027853 | Corynebacterium efficiens YS-314 | NRT2.1 (CE) | SEQ ID NO: 63 |
| 145596376 | Salinispora tropica CNB-440 | NRT2.1 (ST) | SEQ ID NO: 64 |
| 52078816 | Bacillus licheniformis ATCC | NRT2.1 (BL) | SEQ ID NO: 65 |
| | 14580 | | |
| 261406348 | Geobacillus sp. Y412MC10 | NRT2.1 (G-Y412MC10) | SEQ ID NO: 66 |
| 167646919 | Caulobacter sp. K31 | NRT2.2 (C-K31) | SEQ ID NO: 67 |
| 119897579 | Azoarcus sp. BH72 | NRT2.1 (A-BH72) | SEQ ID NO: 68 |
| 188991700 | Xanthomonas campestris pv. | NRT2.1 (XC) | SEQ ID NO: 69 |
| | campestris str. B100 | | |
| 146282747 | Pseudomonas stutzeri A1501 | NRT2.1 (PS) | SEQ ID NO: 70 |
| 220921692 | Methylobacterium nodulans | NRT2.1 (MN) | SEQ ID NO: 71 |
| | ORS 2060 | | |
| 186477088 | Burkholderia phymatum | NRT2.1 (BP) | SEQ ID NO: 72 |
| | STM815 | | |
| 145592742 | Salinispora tropica CNB-440 | NRT2.1 (ST) | SEQ ID NO: 73 |
| 25027972 | Corynebacterium efficiens YS- | NRT2.2 (CE) | SEQ ID NO: 74 |
| | 314 | | |
| 189423281 | Geobacter lovleyi SZ | NRT2.3 (GL) | SEQ ID NO: 75 |
| 74317419 | Thiobacillus denitrificans ATCC | NRT2.1 (TD) | SEQ ID NO: 76 |
| | 25259 | | |
| 94311010 | Cupriavidus metallidurans | NRT2.2 (CM) | SEQ ID NO: 77 |
| | CH34 | | |
| 189425712 | Geobacter lovleyi SZ | NRT2.4 (GL) | SEQ ID NO: 78 |
| 220922117 | Methylobacterium nodulans | NRT2.2 (MN) | SEQ ID NO: 79 |
| | ORS 2060 | | |
| 167647823 | Caulobacter sp. K31 | NRT2.3 (C-K31) | SEQ ID NO: 80 |
| 18413616 | Halomonas halodenitrificans | NRT2.3 (HH) | SEQ ID NO: 81 |
| 16264170 | Sinorhizobium meliloti 1021 | NRT2.1 (SM) | SEQ ID NO: 82 |
| 119387158 | Paracoccus denitrificans | NRT2.1 (PD) | SEQ ID NO: 83 |
| | PD1222 | | |
| 18413620 | Halomonas halodenitrificans | NRT2.1 (HH) | SEQ ID NO: 84 |
| 227514964 | Lactobacillus fermentum ATCC | NRT2.1 (LF) | SEQ ID NO: 85 |
| | 14931 | | |
| 56962496 | Bacillus clausii KSM-K16 | NRT2.1 (BC) | SEQ ID NO: 86 |
| 228947460 | Bacillus thuringiensis serovar | NRT2.1 (BT) | SEQ ID NO: 87 |
| | monterrey BGSC 4AJ1 | | |
| 186470459 | Burkholderia phymatum | NRT2.2 (BP) | SEQ ID NO: 88 |
| | STM815 | | |
| 94313739 | Ralstonia metallidurans CH34 | NRT2.1 (RM) | SEQ ID NO: 89 |
| 229538083 | Planctomyces limnophilus DSM | NRT2.1 (PL) | SEQ ID NO: 90 |
| | 3776 | | |
| 255035828 | Dyadobacter fermentans DSM | NRT2.1 (DF) | SEQ ID NO: 91 |
| | 18053 | | |
| 254424960 | Synechococcus sp. PCC 7335 | NRT2.1 (S-PCC7335) | SEQ ID NO: 92 |
| 116071859 | Synechococcus sp. BL107 | NRT2.1 (S-BL107) | SEQ ID NO: 93 |
| 186681963 | Nostoc punctiforme PCC 73102 | NRT2.1 (NP) | SEQ ID NO: 94 |
| 254422506 | Synechococcus sp. PCC 7335 | NRT2.2 (S-PCC7335) | SEQ ID NO: 95 |
| 110679685 | Roseobacter denitrificans OCh | NRT2.2 (RD) | SEQ ID NO: 96 |
| | 114 | | |
| 283847378 | Bacillus cellulosilyticus DSM | NRT2.3 (BC) | SEQ ID NO: 97 |
| | 2522 | | |
| 170726972 | Shewanella woodyi ATCC | NRT2.2 (SW) | SEQ ID NO: 98 |
| | 51908 | | |
| 254428533 | Alcanivorax sp. DG881 | NRT2.1 (A-DG881) | SEQ ID NO: 99 |
| 254427883 | Alcanivorax sp. DG881 | NRT2.2 (A-DG881) | SEQ ID NO: |
| | | | 100 |
| 91795059 | Shewanella denitrificans OS217 | NRT2.1 (SD) | SEQ ID NO: |
| | | | 101 |
| 170726230 | Shewanella woodyi ATCC | NRT2.1 (SW) | SEQ ID NO: |
| | 51908 | | 102 |
| 89108312 | Escherichia coli W3110 | NRT2.1 (EC) | SEQ ID NO: |
| | | | 103 |
| P37758 | Escherichia coli K12 | NAR U | SEQ ID NO: |
| | | | 104 |

[0105] The following table, Table 3, lists the specific identities of further disclosed polypeptides which belong to the same clade Genus/Family with SEQ ID NO: 4, SEQ ID NO: 19, SEQ ID NO: 20, SEQ ID NO: 22, SEQ ID NO: 35 or SEQ ID NO: 38.

TABLE 3

| Source ID | Baterial strain | SEQ ID NO |
|---|---|---|
| 430746446 | Singulisphaera acidiphila DSM 18658 | 105 |
| 149176108 | Planctomyces maris DSM 8797 | 106 |
| 295676596 | Burkholderia sp. CCGE1002 | 107 |
| 323525977 | Burkholderia sp. CCGE1001 | 108 |
| 187923975 | Burkholderia phytofirmans PsJN | 109 |
| 413963671 | Burkholderia sp. SJ98 | 110 |
| 377819760 | Burkholderia sp. YI23 | 111 |
| 167837863 | Burkholderia thailandensis MSMB43 | 112 |
| 167825807 | Burkholderia pseudomallei 9 | 113 |
| 402570093 | Burkholderia cepacia GG4 | 114 |
| 330815538 | Burkholderia gladioli BSR3 | 115 |
| 167912528 | Burkholderia pseudomallei 112 | 116 |
| 167564088 | Burkholderia oklahomensis EO147 | 117 |
| 53720535 | Burkholderia pseudomallei K96243 | 118 |
| 83720264 | Burkholderia thailandensis E264 | 119 |
| 403520107 | Burkholderia pseudomallei BPC006 | 120 |
| 393766714 | Methylobacterium sp. GXF4 | 121 |
| 170749323 | Methylobacterium radiotolerans JCM 2831 | 122 |
| 46204161 | Magnetospirillum magnetotacticum MS-1 | 123 |
| 163849758 | Methylobacterium extorquens PA1 | 124 |
| 188579650 | Methylobacterium populi BJ001 | 125 |
| 170742934 | Methylobacterium sp. 4-46 | 126 |
| 170692901 | Burkholderia graminis C4D1M | 127 |
| 120609359 | Acidovorax citrulli AAC00-1 | 128 |
| 333916999 | Delftia sp. Cs1-4 | 129 |
| 121592866 | Acidovorax sp. JS42 | 130 |
| 319761229 | Alicycliphilus denitrificans BC | 131 |
| 301631439 | Xenopus (Silurana) tropicalis | 132 |
| 407937190 | Acidovorax sp. KKS102 | 133 |
| 241764574 | Acidovorax delafieldii 2AN | 134 |
| 307726848 | Burkholderia sp. CCGE1003 | 135 |

[0106] The following table, Table 4, lists the specific identities of further disclosed polynucleotides which belong to the same clade Genus/Family with SEQ ID NO: 4, SEQ ID NO: 19, SEQ ID NO: 20, SEQ ID NO: 22, SEQ ID NO: 35 or SEQ ID NO: 38.

TABLE 4

| Source ID | Baterial strain | SEQ ID NO |
|---|---|---|
| 430746446 | Singulisphaera acidiphila DSM 18658 | 136 |
| 149176108 | Planctomyces maris DSM 8797 | 137 |
| 295676596 | Burkholderia sp. CCGE1002 | 138 |
| 323525977 | Burkholderia sp. CCGE1001 | 139 |
| 187923975 | Burkholderia phytofirmans PsJN | 140 |
| 413963671 | Burkholderia sp. SJ98 | 141 |
| 377819760 | Burkholderia sp. YI23 | 142 |
| 167837863 | Burkholderia thailandensis MSMB43 | 143 |
| 167825807 | Burkholderia pseudomallei 9 | 144 |
| 402570093 | Burkholderia cepacia GG4 | 145 |
| 330815538 | Burkholderia gladioli BSR3 | 146 |
| 167912528 | Burkholderia pseudomallei 112 | 147 |
| 167564088 | Burkholderia oklahomensis EO147 | 148 |
| 53720535 | Burkholderia pseudomallei K96243 | 149 |
| 83720264 | Burkholderia thailandensis E264 | 150 |
| 403520107 | Burkholderia pseudomallei BPC006 | 151 |
| 393766714 | Methylobacterium sp. GXF4 | 152 |
| 170749323 | Methylobacterium radiotolerans JCM 2831 | 153 |
| 46204161 | Magnetospirillum magnetotacticum MS-1 | 154 |
| 163849758 | Methylobacterium extorquens PA1 | 155 |
| 188579650 | Methylobacterium populi BJ001 | 156 |
| 170742934 | Methylobacterium sp. 4-46 | 157 |
| 170692901 | Burkholderia graminis C4D1M | 158 |
| 120609359 | Acidovorax citrulli AAC00-1 | 159 |
| 333916999 | Delftia sp. Cs1-4 | 160 |
| 121592866 | Acidovorax sp. JS42 | 161 |
| 319761229 | Alicycliphilus denitrificans BC | 162 |
| 301631439 | Xenopus (Silurana) tropicalis | 163 |
| 407937190 | Acidovorax sp. KKS102 | 164 |
| 241764574 | Acidovorax delafieldii 2AN | 165 |
| 307726848 | Burkholderia sp. CCGE1003 | 166 |

[0107] The following table, Table 5, lists the specific identities of further disclosed polypeptides having diverse substrate specificity, e.g. sugar transporter.

TABLE 5

| Source ID | Baterial strain | SEQ ID NO |
|---|---|---|
| 398381448 | Rhizobium sp. AP16 | 167 |
| 187925681 | Burkholderia phytofirmans PsJN | 168 |
| 443349358 | Bacillus subtilis subsp. inaquosorum KCTC | 169 |
| | 13429 | |
| 238756214 | Yersinia ruckeri ATCC 29473 | 170 |
| 21233541 | Xanthomonas campestris pv. campestris | 171 |
| | str. ATCC 33913 | |
| 162449514 | Sorangium cellulosum So ce56 | 172 |
| 91779392 | Burkholderia xenovorans LB400 | 173 |
| 322699061 | Metarhizium acridum CQMa 102 | 174 |
| 255556942 | Ricinus communis | 175 |
| 403674253 | Acinetobacter sp. NCTC 10304 | 176 |
| 357413593 | Streptomyces flavogriseus ATCC 33331 | 177 |
| 145222743 | Mycobacterium gilvum PYR-GCK | 178 |
| 403237236 | Bacillus sp. 10403023 | 179 |
| 26988817 | Pseudomonas putida KT2440 | 180 |
| 418051437 | Mycobacterium rhodesiae JS60 | 181 |
| 440695083 | Streptomyces turgidiscabies Car8 | 182 |
| 419763327 | Klebsiella pneumoniae subsp. pneumoniae | 183 |
| | DSM 30104 | |
| 238792474 | Yersinia intermedia ATCC 29909 | 184 |
| 219668545 | Desulfitobacterium hafniense DCB-2 | 185 |
| 134099953 | Saccharopolyspora erythraea NRRL 2338 | 186 |
| 390959594 | Terriglobus roseus DSM 18391 | 187 |
| 399578565 | Halogranum salarium B-1 | 188 |
| 147678099 | Pelotomaculum thermopropionicum SI | 189 |
| 395797926 | Pseudomonas sp. Ag1 | 190 |
| 340347070 | Prevotella dentalis DSM 3688 | 191 |
| 325962868 | Arthrobacter phenanthrenivorans Sphe3 | 192 |
| 381187632 | Flavobacterium frigoris PS1 | 193 |

[0108] The following table, Table 6, lists the specific identities of further disclosed polynucleotides having diverse substrate specificity, e.g. sugar transporter.

TABLE 6

| Source ID | Baterial strain | SEQ ID NO |
|---|---|---|
| 398381448 | Rhizobium sp. AP16 | 194 |
| 187925681 | Burkholderia phytofirmans PsJN | 195 |
| 443349358 | Bacillus subtilis subsp. inaquosorum | 196 |
| | KCTC 13429 | |
| 238756214 | Yersinia ruckeri ATCC 29473 | 197 |
| 21233541 | Xanthomonas campestris pv. campestris | 198 |
| | str. ATCC 33913 | |
| 162449514 | Sorangium cellulosum So ce56 | 199 |
| 91779392 | Burkholderia xenovorans LB400 | 200 |
| 322699061 | Metarhizium acridum CQMa 102 | 201 |
| 255556942 | Ricinus communis | 202 |
| 403674253 | Acinetobacter sp. NCTC 10304 | 203 |
| 357413593 | Streptomyces flavogriseus ATCC 33331 | 204 |
| 145222743 | Mycobacterium gilvum PYR-GCK | 205 |
| 403237236 | Bacillus sp. 10403023 | 206 |
| 26988817 | Pseudomonas putida KT2440 | 207 |
| 418051437 | Mycobacterium rhodesiae JS60 | 208 |
| 440695083 | Streptomyces turgidiscabies Car8 | 209 |
| 419763327 | Klebsiella pneumoniae subsp. pneumoniae | 210 |
| | DSM 30104 | |
| 238792474 | Yersinia intermedia ATCC 29909 | 211 |
| 219668545 | Desulfitobacterium hafniense DCB-2 | 212 |
| 134099953 | Saccharopolyspora erythraea NRRL 2338 | 213 |
| 390959594 | Terriglobus roseus DSM 18391 | 214 |
| 399578565 | Halogranum salarium B-1 | 215 |
| 147678099 | Pelotomaculum thermopropionicum SI | 216 |
| 395797926 | Pseudomonas sp. Ag1 | 217 |
| 340347070 | Prevotella dentalis DSM 3688 | 218 |
| 325962868 | Arthrobacter phenanthrenivorans Sphe3 | 219 |
| 381187632 | Flavobacterium frigoris PS1 | 220 |

[0109] Construction of Nucleic Acids

[0110] The isolated nucleic acids of the present disclosure can be made using (a) standard recombinant methods, (b) synthetic techniques, or combinations thereof. In some embodiments, the polynucleotides of the present disclosure will be cloned, amplified or otherwise constructed from a fungus or bacteria.

[0111] The nucleic acids may conveniently comprise sequences in addition to a polynucleotide of the present disclosure. For example, a multi-cloning site comprising one or more endonuclease restriction sites may be inserted into the nucleic acid to aid in isolation of the polynucleotide. Also, translatable sequences may be inserted to aid in the isolation of the translated polynucleotide of the present disclosure. For example, a hexa-histidine marker sequence provides a convenient means to purify the proteins of the present disclosure. The nucleic acid of the present disclosure—excluding the polynucleotide sequence—is optionally a vector, adapter or linker for cloning and/or expression of a polynucleotide of the present disclosure. Additional sequences may be added to such cloning and/or expression sequences to optimize their function in cloning and/or expression, to aid in isolation of the polynucleotide, or to improve the introduction of the polynucleotide into a cell. Typically, the length of a nucleic acid of the present disclosure less the length of its polynucleotide of the present disclosure is less than 20 kilobase pairs, often less than 15 kb and frequently less than 10 kb. Use of cloning vectors, expression vectors, adapters and linkers is well known in the art. Exemplary nucleic acids include such vectors as: M13, lambda ZAP Express, lambda ZAP II, lambda gt10, lambda gt11, pBK-CMV, pBK-RSV, pBluescript II, lambda DASH II, lambda EMBL 3, lambda EMBL 4, pWE15, SuperCos 1, SurfZap, Uni-ZAP, pBC, pBS+/−, pSG5, pBK, pCR-Script, pET, pSPUTK, p3′SS, pGEM, pSK+/−, pGEX, pSPORTI and II, pOPRSVI CAT, pOPI3 CAT, pXT1, pSG5, pPbac, pMbac, pMC1neo, pOG44, pOG45, pFRTβGAL, pNEOβGAL, pRS403, pRS404, pRS405, pRS406, pRS413, pRS414, pRS415, pRS416, lambda MOSSIox and lambda MOSElox. Optional vectors for the present disclosure, include but are not limited to, lambda ZAP II, and pGEX. For a description of various nucleic acids see, e.g., Stratagene Cloning Systems, Catalogs 1995, 1996, 1997 (La Jolla, Calif.) and, Amersham Life Sciences, Inc, Catalog '97 (Arlington Heights, Ill.).

[0112] Synthetic Methods for Constructing Nucleic Acids

[0113] The isolated nucleic acids of the present disclosure can also be prepared by direct chemical synthesis by methods such as the phosphotriester method of Narang, et al., (1979) Meth. Enzymol. 68:90-9; the phosphodiester method of Brown, et al., (1979) Meth. Enzymol. 68:109-51; the diethylphosphoramidite method of Beaucage, et al., (1981) Tetra. Letts. 22(20):1859-62; the solid phase phosphoramidite triester method described by Beaucage, et al., supra, e.g., using an automated synthesizer, e.g., as described in Needham-VanDevanter, et al., (1984) Nucleic Acids Res. 12:6159-68 and the solid support method of U.S. Pat. No. 4,458,066. Chemical synthesis generally produces a single stranded oligonucleotide. This may be converted into double stranded DNA by hybridization with a complementary sequence or by polymerization with a DNA polymerase using the single strand as a template. One of skill will recognize that while chemical synthesis of DNA is limited to sequences of about 100 bases, longer sequences may be obtained by the ligation of shorter sequences.

[0114] UTRs and Codon Preference

[0115] In general, translational efficiency has been found to be regulated by specific sequence elements in the 5′ non-coding or untranslated region (5′ UTR) of the RNA. Positive sequence motifs include translational initiation consensus sequences (Kozak, (1987) Nucleic Acids Res.15:8125) and the 5<G>7 methyl GpppG RNA cap structure (Drummond, et al., (1985) Nucleic Acids Res. 13:7375). Negative elements include stable intramolecular 5′ UTR stem-loop structures (Muesing, et al., (1987) Cell 48:691) and AUG sequences or short open reading frames preceded by an appropriate AUG in the 5′ UTR (Kozak, supra, Rao, et al., (1988) Mol. and Cell. Biol. 8:284). Accordingly, the present disclosure provides 5′ and/or 3′ UTR regions for modulation of translation of heterologous coding sequences.

[0116] Further, the polypeptide-encoding segments of the polynucleotides of the present disclosure can be modified to alter codon usage. Altered codon usage can be employed to alter translational efficiency and/or to optimize the coding sequence for expression in a desired host or to optimize the codon usage in a heterologous sequence for expression in maize. Codon usage in the coding regions of the polynucleotides of the present disclosure can be analyzed statistically using commercially available software packages such as “Codon Preference” available from the University of Wisconsin Genetics Computer Group. See, Devereaux, et al., (1984) Nucleic Acids Res. 12:387-395) or MacVector 4.1 (Eastman Kodak Co., New Haven, Conn.). Thus, the present disclosure provides a codon usage frequency characteristic of the coding region of at least one of the polynucleotides of the present disclosure. The number of polynucleotides (3 nucleotides per amino acid) that can be used to determine a codon usage frequency can be any integer from 3 to the number of polynucleotides of the present disclosure as provided herein. Optionally, the polynucleotides will be full-length sequences. An exemplary number of sequences for statistical analysis can be at least 1, 5, 10, 20, 50 or 100.

[0117] Sequence Shuffling

[0118] The present disclosure provides methods for sequence shuffling using polynucleotides of the present disclosure and compositions resulting therefrom. Sequence shuffling is described in PCT Publication Number 1996/19256. See also, Zhang, et al., (1997) Proc. Natl. Acad. Sci. USA 94:4504-9 and Zhao, et al., (1998) Nature Biotech 16:258-61. Generally, sequence shuffling provides a means for generating libraries of polynucleotides having a desired characteristic, which can be selected or screened for. Libraries of recombinant polynucleotides are generated from a population of related sequence polynucleotides, which comprise sequence regions, which have substantial sequence identity and can be homologously recombined in vitro or in vivo. The population of sequence-recombined polynucleotides comprises a subpopulation of polynucleotides which possess desired or advantageous characteristics and which can be selected by a suitable selection or screening method. The characteristics can be any property or attribute capable of being selected for or detected in a screening system, and may include properties of: an encoded protein, a transcriptional element, a sequence controlling transcription, RNA processing, RNA stability, chromatin conformation, translation or other expression property of a gene or transgene, a replicative element, a protein-binding element, or the like, such as any feature which confers a selectable or detectable property. In some embodiments, the selected characteristic will be an altered Kₘ and/or K_{cat} over the wild-type protein as provided herein. In other embodiments, a protein or polynucleotide generated from sequence shuffling will have a ligand binding affinity greater than the non-shuffled wild-type polynucleotide. In yet other embodiments, a protein or polynucleotide generated from sequence shuffling will have an altered pH optimum as compared to the non-shuffled wild-type polynucleotide. The increase in such properties can be at least 110%, 120%, 130%, 140% or greater than 150% of the wild-type value.

[0119] Recombinant Expression Cassettes

[0120] The present disclosure further provides recombinant expression cassettes comprising a nucleic acid of the present disclosure. A nucleic acid sequence coding for the desired polynucleotide of the present disclosure, for example a cDNA or a genomic sequence encoding a polypeptide long enough to code for an active protein of the present disclosure, can be used to construct a recombinant expression cassette which can be introduced into the desired host cell. A recombinant expression cassette will typically comprise a polynucleotide of the present disclosure operably linked to transcriptional initiation regulatory sequences which will direct the transcription of the polynucleotide in the intended host cell, such as tissues of a transformed plant.

[0121] For example, plant expression vectors may include (1) a cloned plant gene under the transcriptional control of 5′ and 3′ regulatory sequences and (2) a dominant selectable marker. Such plant expression vectors may also contain, if desired, a promoter regulatory region (e.g., one conferring inducible or constitutive, environmentally- or developmentally-regulated, or cell- or tissue-specific/selective expression), a transcription initiation start site, a ribosome binding site, an RNA processing signal, a transcription termination site and/or a polyadenylation signal.

[0122] A plant promoter fragment can be employed which will direct expression of a polynucleotide of the present disclosure in all tissues of a regenerated plant. Such promoters are referred to herein as “constitutive” promoters and are active under most environmental conditions and states of development or cell differentiation. Examples of constitutive promoters include the 1′- or 2′-promoter derived from T-DNA of Agrobacterium tumefaciens, the Smas promoter, the cinnamyl alcohol dehydrogenase promoter (U.S. Pat. No. 5,683,439), the Nos promoter, the rubisco promoter, the GRP1-8 promoter, the 35S promoter from cauliflower mosaic virus (CaMV), as described in Odell, et al., (1985) Nature 313:810-2; rice actin (McElroy, et al., (1990) Plant Cell 163-171); ubiquitin (Christensen, et al., (1992) Plant Mol. Biol. 12:619-632 and Christensen, et al., (1992) Plant Mol. Biol. 18:675-89); pEMU (Last, et al., (1991) Theor. Appl. Genet. 81:581-8); MAS (Velten, et al., (1984) EMBO J. 3:2723-30) and maize H3 histone (Lepetit, et al., (1992) Mol. Gen. Genet. 231:276-85 and Atanassvoa, et al., (1992) Plant Journal 2(3):291-300); ALS promoter, as described in PCT Application Number WO 1996/30530 and other transcription initiation regions from various plant genes known to those of skill. For the present disclosure ubiquitin is the preferred promoter for expression in monocot plants.

[0123] Alternatively, the plant promoter can direct expression of a polynucleotide of the present disclosure in a specific tissue or may be otherwise under more precise environmental or developmental control. Such promoters are referred to here as “inducible” promoters. Environmental conditions that may effect transcription by inducible promoters include pathogen attack, anaerobic conditions or the presence of light. Examples of inducible promoters are the Adh1 promoter, which is inducible by hypoxia or cold stress, the Hsp70 promoter, which is inducible by heat stress and the PPDK promoter, which is inducible by light.

[0124] Examples of promoters under developmental control include promoters that initiate transcription only, or preferentially, in certain tissues, such as leaves, roots, fruit, seeds or flowers. The operation of a promoter may also vary depending on its location in the genome. Thus, an inducible promoter may become fully or partially constitutive in certain locations.

[0125] If polypeptide expression is desired, it is generally desirable to include a polyadenylation region at the 3′-end of a polynucleotide coding region. The polyadenylation region can be derived from a variety of plant genes, or from T-DNA. The 3′ end sequence to be added can be derived from, for example, the nopaline synthase or octopine synthase genes or alternatively from another plant gene or less preferably from any other eukaryotic gene. Examples of such regulatory elements include, but are not limited to, 3′ termination and/or polyadenylation regions such as those of the Agrobacterium tumefaciens nopaline synthase (nos) gene (Bevan, et al., (1983) Nucleic Acids Res. 12:369-85); the potato proteinase inhibitor II (PINII) gene (Keil, et al., (1986) Nucleic Acids Res. 14:5641-50 and An, et al., (1989) Plant Cell 1:115-22) and the CaMV 19S gene (Mogen, et al., (1990) Plant Cell 2:1261-72).

[0126] An intron sequence can be added to the 5′ untranslated region or the coding sequence of the partial coding sequence to increase the amount of the mature message that accumulates in the cytosol. Inclusion of a spliceable intron in the transcription unit in both plant and animal expression constructs has been shown to increase gene expression at both the mRNA and protein levels up to 1000-fold (Buchman and Berg, (1988) Mol. Cell Biol. 8:4395-4405; Callis, et al., (1987) Genes Dev. 1:1183-200). Such intron enhancement of gene expression is typically greatest when placed near the 5′ end of the transcription unit. Use of maize introns Adh1-S intron 1, 2 and 6, the Bronze-1 intron are known in the art. See generally, The Maize Handbook, Chapter 116, Freeling and Walbot, eds., Springer, New York (1994).

[0127] Plant signal sequences, including, but not limited to, signal-peptide encoding DNA/RNA sequences which target proteins to the extracellular matrix of the plant cell (Dratewka-Kos, et al., (1989) J. Biol. Chem. 264:4896-900), such as the Nicotiana plumbaginifolia extension gene (DeLoose, et al., (1991) Gene 99:95-100); signal peptides which target proteins to the vacuole, such as the sweet potato sporamin gene (Matsuka, et al., (1991) Proc. Natl. Acad. Sci. USA 88:834) and the barley lectin gene (Wilkins, et al., (1990) Plant Cell, 2:301-13); signal peptides which cause proteins to be secreted, such as that of PRIb (Lind, et al., (1992) Plant Mol. Biol. 18:47-53) or the barley alpha amylase (BAA) (Rahmatullah, et al., (1989) Plant Mol. Biol. 12:119, and hereby incorporated by reference) or signal peptides which target proteins to the plastids such as that of rapeseed enoyl-Acp reductase (Verwaert, et al., (1994) Plant Mol. Biol. 26:189-202) are useful in the disclosure.

[0128] The vector comprising the sequences from a polynucleotide of the present disclosure will typically comprise a marker gene, which confers a selectable phenotype on plant cells. Usually, the selectable marker gene will encode antibiotic resistance, with suitable genes including genes coding for resistance to the antibiotic spectinomycin (e.g., the aada gene), the streptomycin phosphotransferase (SPT) gene coding for streptomycin resistance, the neomycin phosphotransferase (NPTII) gene encoding kanamycin or geneticin resistance, the hygromycin phosphotransferase (HPT) gene coding for hygromycin resistance, genes coding for resistance to herbicides which act to inhibit the action of acetolactate synthase (ALS), in particular the sulfonylurea-type herbicides (e.g., the acetolactate synthase (ALS) gene containing mutations leading to such resistance in particular the S4 and/or Hra mutations), genes coding for resistance to herbicides which act to inhibit action of glutamine synthase, such as phosphinothricin or basta (e.g., the bar gene) or other such genes known in the art. The bar gene encodes resistance to the herbicide basta and the ALS gene encodes resistance to the herbicide chlorsulfuron.

[0129] Typical vectors useful for expression of genes in higher plants are well known in the art and include vectors derived from the tumor-inducing (Ti) plasmid of Agrobacterium tumefaciens described by Rogers, et al. (1987), Meth. Enzymol. 153:253-77. These vectors are plant integrating vectors in that on transformation, the vectors integrate a portion of vector DNA into the genome of the host plant. Exemplary A. tumefaciens vectors useful herein are plasmids pKYLX6 and pKYLX7 of Schardl, et al., (1987) Gene 61:1-11 and Berger, et al., (1989) Proc. Natl. Acad. Sci. USA, 86:8402-6. Another useful vector herein is plasmid pB1101.2 that is available from CLONTECH Laboratories, Inc. (Palo Alto, Calif.).

[0130] Expression of Proteins in Host Cells

[0131] Using the nucleic acids of the present disclosure, one may express a protein of the present disclosure in a recombinantly engineered cell such as bacteria, yeast, insect, mammalian or preferably plant cells. The cells produce the protein in a non-natural condition (e.g., in quantity, composition, location and/or time), because they have been genetically altered through human intervention to do so.

[0132] It is expected that those of skill in the art are knowledgeable in the numerous expression systems available for expression of a nucleic acid encoding a protein of the present disclosure. No attempt to describe in detail the various methods known for the expression of proteins in prokaryotes or eukaryotes will be made.

[0133] In brief summary, the expression of isolated nucleic acids encoding a protein of the present disclosure will typically be achieved by operably linking, for example, the DNA or cDNA to a promoter (which is either constitutive or inducible), followed by incorporation into an expression vector. The vectors can be suitable for replication and integration in either prokaryotes or eukaryotes. Typical expression vectors contain transcription and translation terminators, initiation sequences, and promoters useful for regulation of the expression of the DNA encoding a protein of the present disclosure. To obtain high level expression of a cloned gene, it is desirable to construct expression vectors which contain, at the minimum, a strong promoter, such as ubiquitin, to direct transcription, a ribosome binding site for translational initiation and a transcription/translation terminator. Constitutive promoters are classified as providing for a range of constitutive expression. Thus, some are weak constitutive promoters, and others are strong constitutive promoters. Generally, by “weak promoter” is intended a promoter that drives expression of a coding sequence at a low level. By “low level” is intended at levels of about 1/10,000 transcripts to about 1/100,000 transcripts to about 1/500,000 transcripts. Conversely, a “strong promoter” drives expression of a coding sequence at a “high level,” or about 1/10 transcripts to about 1/100 transcripts to about 1/1,000 transcripts.

[0134] One of skill would recognize that modifications could be made to a protein of the present disclosure without diminishing its biological activity. Some modifications may be made to facilitate the cloning, expression or incorporation of the targeting molecule into a fusion protein. Such modifications are well known to those of skill in the art and include, for example, a methionine added at the amino terminus to provide an initiation site, or additional amino acids (e.g., poly His) placed on either terminus to create conveniently located restriction sites or termination codons or purification sequences.

[0135] Expression in Prokaryotes

[0136] Prokaryotic cells may be used as hosts for expression. Prokaryotes most frequently are represented by various strains of E. coli; however, other microbial strains may also be used. Commonly used prokaryotic control sequences which are defined herein to include promoters for transcription initiation, optionally with an operator, along with ribosome binding site sequences, include such commonly used promoters as the beta lactamase (penicillinase) and lactose (lac) promoter systems (Chang, et al., (1977) Nature 198:1056), the tryptophan (trp) promoter system (Goeddel, et al., (1980) Nucleic Acids Res. 8:4057) and the lambda derived P L promoter and N-gene ribosome binding site (Shimatake, et al., (1981) Nature 292:128). The inclusion of selection markers in DNA vectors transfected in E. coli is also useful. Examples of such markers include genes specifying resistance to ampicillin, tetracycline, or chloramphenicol.

[0137] The vector is selected to allow introduction of the gene of interest into the appropriate host cell. Bacterial vectors are typically of plasmid or phage origin. Appropriate bacterial cells are infected with phage vector particles or transfected with naked phage vector DNA. If a plasmid vector is used, the bacterial cells are transfected with the plasmid vector DNA. Expression systems for expressing a protein of the present disclosure are available using Bacillus sp. and Salmonella (Palva, et al., (1983) Gene 22:229-35; Mosbach, et al., (1983) Nature 302:543-5). The pGEX-4T-1 plasmid vector from Pharmacia is the preferred E. coli expression vector for the present disclosure.

[0138] Expression in Eukaryotes

[0139] A variety of eukaryotic expression systems such as yeast, insect cell lines, plant and mammalian cells are known to those of skill in the art. As explained briefly below, the present disclosure can be expressed in these eukaryotic systems. In some embodiments, transformed/transfected plant cells, as discussed infra, are employed as expression systems for production of the proteins of the instant disclosure.

[0140] Synthesis of heterologous proteins in yeast is well known. Sherman, et al., (1982) Methods in Yeast Genetics, Cold Spring Harbor Laboratory is a well recognized work describing the various methods available to produce the protein in yeast. Two widely utilized yeasts for production of eukaryotic proteins are Saccharomyces cerevisiae and Pichia pastoris. Vectors, strains and protocols for expression in Saccharomyces and Pichia are known in the art and available from commercial suppliers (e.g., Invitrogen). Suitable vectors usually have expression control sequences, such as promoters, including 3-phosphoglycerate kinase or alcohol oxidase, and an origin of replication, termination sequences and the like as desired.

[0141] A protein of the present disclosure, once expressed, can be isolated from yeast by lysing the cells and applying standard protein isolation techniques to the lysates or the pellets. The monitoring of the purification process can be accomplished by using Western blot techniques or radioimmunoassay of other standard immunoassay techniques.

[0142] The sequences encoding proteins of the present disclosure can also be ligated to various expression vectors for use in transfecting cell cultures of, for instance, mammalian, insect or plant origin. Mammalian cell systems often will be in the form of monolayers of cells although mammalian cell suspensions may also be used. A number of suitable host cell lines capable of expressing intact proteins have been developed in the art and include the HEK293, BHK21 and CHO cell lines. Expression vectors for these cells can include expression control sequences, such as an origin of replication, a promoter (e.g., the CMV promoter, a HSV tk promoter or pgk (phosphoglycerate kinase) promoter), an enhancer (Queen, et al., (1986) Immunol. Rev. 89:49) and necessary processing information sites, such as ribosome binding sites, RNA splice sites, polyadenylation sites (e.g., an SV40 large T Ag poly A addition site) and transcriptional terminator sequences. Other animal cells useful for production of proteins of the present disclosure are available, for instance, from the American Type Culture Collection Catalogue of Cell Lines and Hybridomas (7^{th} ed., 1992).

[0143] Appropriate vectors for expressing proteins of the present disclosure in insect cells are usually derived from the SF9 baculovirus. Suitable insect cell lines include mosquito larvae, silkworm, armyworm, moth and Drosophila cell lines such as a Schneider cell line (see, e.g., Schneider, (1987) J. Embryol. Exp. Morphol. 27:353-65).

[0144] As with yeast, when higher animal or plant host cells are employed, polyadenlyation or transcription terminator sequences are typically incorporated into the vector. An example of a terminator sequence is the polyadenlyation sequence from the bovine growth hormone gene. Sequences for accurate splicing of the transcript may also be included. An example of a splicing sequence is the VP1 intron from SV40 (Sprague, et al.,(1983) J. Virol. 45:773-81). Additionally, gene sequences to control replication in the host cell may be incorporated into the vector such as those found in bovine papilloma virus type-vectors (Saveria-Campo, “Bovine Papilloma Virus DNA a Eukaryotic Cloning Vector,” in DNA Cloning: A Practical Approach, vol. II, Glover, ed., IRL Press, Arlington, Va., pp. 213-38 (1985)).

[0145] In addition, the nitrate uptake-associated gene placed in the appropriate plant expression vector can be used to transform plant cells. The polypeptide can then be isolated from plant callus or the transformed cells can be used to regenerate transgenic plants. Such transgenic plants can be harvested, and the appropriate tissues (seed or leaves, for example) can be subjected to large scale protein extraction and purification techniques.

[0146] Plant Transformation Methods

[0147] Numerous methods for introducing foreign genes into plants are known and can be used to insert a nitrate uptake-associated polynucleotide into a plant host, including biological and physical plant transformation protocols. See, e.g., Miki, et al., “Procedure for Introducing Foreign DNA into Plants,” in Methods in Plant Molecular Biology and Biotechnology, Glick and Thompson, eds., CRC Press, Inc., Boca Raton, pp. 67-88 (1993). The methods chosen vary with the host plant, and include chemical transfection methods such as calcium phosphate, microorganism-mediated gene transfer such as Agrobacterium (Horsch et al., (1985) Science 227:1229-31), electroporation, micro-injection and biolistic bombardment.

[0148] Expression cassettes and vectors and in vitro culture methods for plant cell or tissue transformation and regeneration of plants are known and available. See, e.g., Gruber et al., “Vectors for Plant Transformation,” in Methods in Plant Molecular Biology and Biotechnology, supra, pp. 89-119.

[0149] The isolated polynucleotides or polypeptides may be introduced into the plant by one or more techniques typically used for direct delivery into cells. Such protocols may vary depending on the type of organism, cell, plant or plant cell, i.e., monocot or dicot, targeted for gene modification. Suitable methods of transforming plant cells include microinjection (Crossway, et al., (1986) Biotechniques 4:320-334 and U.S. Pat. No. 6,300,543), electroporation (Riggs, et al., (1986) Proc. Natl. Acad. Sci. USA 83:5602-5606, direct gene transfer (Paszkowski, et al., (1984) EMBO J. 3:2717-2722) and ballistic particle acceleration (see, for example, Sanford, et al., U.S. Pat. No. 4,945,050; WO 1991/10725 and McCabe, et al., (1988) Biotechnology 6:923-926). Also see, Tomes, et al., “Direct DNA Transfer into Intact Plant Cells Via Microprojectile Bombardment”. pp. 197-213 in Plant Cell, Tissue and Organ Culture, Fundamental Methods. eds. Gamborg and Phillips. Springer-Verlag Berlin Heidelberg N.Y., 1995; U.S. Pat. No. 5,736,369 (meristem); Weissinger, et al., (1988) Ann. Rev. Genet. 22:421-477; Sanford, et al., (1987) Particulate Science and Technology 5:27-37 (onion); Christou, et al., (1988) Plant Physiol. 87:671-674 (soybean); Datta, et al., (1990) Biotechnology 8:736-740 (rice); Klein, et al., (1988) Proc. Natl. Acad. Sci. USA 85:4305-4309 (maize); Klein, et al., (1988) Biotechnology 6:559-563 (maize); WO 1991/10725 (maize); Klein, et al., (1988) Plant Physiol. 91:440-444 (maize); Fromm, et al., (1990) Biotechnology 8:833-839 and Gordon-Kamm, et al., (1990) Plant Cell 2:603-618 (maize); Hooydaas-Van Slogteren and Hooykaas (1984) Nature (London) 311:763-764; Bytebierm, et al., (1987) Proc. Natl. Acad. Sci. USA 84:5345-5349 (Liliaceae); De Wet, et al., (1985) In The Experimental Manipulation of Ovule Tissues, ed. Chapman, et al., pp. 197-209. Longman, N.Y. (pollen); Kaeppler, et al., (1990) Plant Cell Reports 9:415-418; and Kaeppler, et al., (1992) Theor. Appl. Genet. 84:560-566 (whisker-mediated transformation); U.S. Pat. No. 5,693,512 (sonication); D'Halluin, et al., (1992) Plant Cell 4:1495-1505 (electroporation); Li, et al., (1993) Plant Cell Reports 12:250-255 and Christou and Ford, (1995) Annals of Botany 75:407-413 (rice); Osjoda, et al., (1996) Nature Biotech. 14:745-750; Agrobacterium mediated maize transformation (U.S. Pat. No. 5,981,840); silicon carbide whisker methods (Frame, et al., (1994) Plant J. 6:941-948); laser methods (Guo, et al., (1995) Physiologia Plantarum 93:19-24); sonication methods (Bao, et al., (1997) Ultrasound in Medicine & Biology 23:953-959; Finer and Finer, (2000) Lett Appl Microbiol. 30:406-10; Amoah, et al., (2001) J Exp Bot 52:1135-42); polyethylene glycol methods (Krens, et al., (1982) Nature 296:72-77); protoplasts of monocot and dicot cells can be transformed using electroporation (Fromm, et al., (1985) Proc. Natl. Acad. Sci. USA 82:5824-5828) and microinjection (Crossway, et al., (1986) Mol. Gen. Genet. 202:179-185), all of which are herein incorporated by reference.

[0150] Agrobacterium-Mediated Transformation

[0151] The most widely utilized method for introducing an expression vector into plants is based on the natural transformation system of Agrobacterium. A. tumefaciens and A. rhizogenes are plant pathogenic soil bacteria, which genetically transform plant cells. The Ti and Ri plasmids of A. tumefaciens and A. rhizogenes, respectively, carry genes responsible for genetic transformation of plants. See, e.g., Kado, (1991) Crit. Rev. Plant Sci. 10:1. Descriptions of the Agrobacterium vector systems and methods for Agrobacterium-mediated gene transfer are provided in Gruber, et al., supra; Miki, et al., supra and Moloney, et al., (1989) Plant Cell Reports 8:238.

[0152] Similarly, the gene can be inserted into the T-DNA region of a Ti or Ri plasmid derived from A. tumefaciens or A. rhizogenes, respectively. Thus, expression cassettes can be constructed as above, using these plasmids. Many control sequences are known which when coupled to a heterologous coding sequence and transformed into a host organism show fidelity in gene expression with respect to tissue/organ specificity of the original coding sequence. See, e.g., Benfey and Chua, (1989) Science 244:174-81. Particularly suitable control sequences for use in these plasmids are promoters for constitutive leaf-specific expression of the gene in the various target plants. Other useful control sequences include a promoter and terminator from the nopaline synthase gene (NOS). The NOS promoter and terminator are present in the plasmid pARC2, available from the American Type Culture Collection and designated ATCC 67238. If such a system is used, the virulence (vir) gene from either the Ti or Ri plasmid must also be present, either along with the T-DNA portion or via a binary system where the vir gene is present on a separate vector. Such systems, vectors for use therein, and methods of transforming plant cells are described in U.S. Pat. No. 4,658,082; U.S. patent application Ser. No. 913,914, filed Oct. 1, 1986, as referenced in U.S. Pat. No. 5,262,306, issued Nov. 16, 1993 and Simpson, et al., (1986) Plant Mol. Biol. 6:403-15 (also referenced in the '306 patent), all incorporated by reference in their entirety.

[0153] Once constructed, these plasmids can be placed into A. rhizogenes or A. tumefaciens and these vectors used to transform cells of plant species, which are ordinarily susceptible to Fusarium or Alternaria infection. Several other transgenic plants are also contemplated by the present disclosure including but not limited to soybean, corn, sorghum, alfalfa, rice, clover, cabbage, banana, coffee, celery, tobacco, cowpea, cotton, melon and pepper. The selection of either A. tumefaciens or A. rhizogenes will depend on the plant being transformed thereby. In general A. tumefaciens is the preferred organism for transformation. Most dicotyledonous plants, some gymnosperms, and a few monocotyledonous plants (e.g., certain members of the Liliales and Arales) are susceptible to infection with A. tumefaciens. A. rhizogenes also has a wide host range, embracing most dicots and some gymnosperms, which includes members of the Leguminosae, Cornpositae and Chenopodiaceae. Monocot plants can now be transformed with some success. European Patent Application Number 604 662 A1 discloses a method for transforming monocots using Agrobacterium. European Patent Application Number 672 752 A1 discloses a method for transforming monocots with Agrobacterium using the scutellum of immature embryos. Ishida, et al., discuss a method for transforming maize by exposing immature embryos to A. tumefaciens (Nature Biotechnology 14:745-50 (1996)).

[0154] Once transformed, these cells can be used to regenerate transgenic plants. For example, whole plants can be infected with these vectors by wounding the plant and then introducing the vector into the wound site. Any part of the plant can be wounded, including leaves, stems and roots. Alternatively, plant tissue, in the form of an explant, such as cotyledonary tissue or leaf disks, can be inoculated with these vectors, and cultured under conditions, which promote plant regeneration. Roots or shoots transformed by inoculation of plant tissue with A. rhizogenes or A. tumefaciens, containing the gene coding for the fumonisin degradation enzyme, can be used as a source of plant tissue to regenerate fumonisin-resistant transgenic plants, either via somatic embryogenesis or organogenesis. Examples of such methods for regenerating plant tissue are disclosed in Shahin, (1985) Theor. Appl. Genet. 69:235-40; U.S. Pat. No. 4,658,082; Simpson, et al., supra; and U.S patent application Ser. No. 913,913 and 913,914, both filed Oct. 1, 1986, as referenced in U.S. Pat. No. 5,262,306, issued Nov. 16, 1993, the entire disclosures therein incorporated herein by reference.

[0155] Direct Gene Transfer

[0156] Despite the fact that the host range for Agrobacterium-mediated transformation is broad, some major cereal crop species and gymnosperms have generally been recalcitrant to this mode of gene transfer, even though some success has recently been achieved in rice (Hiei, et al., (1994) The Plant Journal 6:271-82). Several methods of plant transformation, collectively referred to as direct gene transfer, have been developed as an alternative to Agrobacterium-mediated transformation.

[0157] A generally applicable method of plant transformation is microprojectile-mediated transformation, where DNA is carried on the surface of microprojectiles measuring about 1 to 4 μm. The expression vector is introduced into plant tissues with a biolistic device that accelerates the microprojectiles to speeds of 300 to 600 m/s which is sufficient to penetrate the plant cell walls and membranes (Sanford, et al., (1987) Part. Sci. Technol. 5:27; Sanford, (1988) Trends Biotech 6:299; Sanford, (1990) Physiol. Plant 79:206 and Klein, et al., (1992) Biotechnology 10:268).

[0158] Another method for physical delivery of DNA to plants is sonication of target cells as described in Zang, et al., (1991) BioTechnology 9:996. Alternatively, liposome or spheroplast fusions have been used to introduce expression vectors into plants. See, e.g., Deshayes, et al., (1985) EMBO J. 4:2731 and Christou, et al., (1987) Proc. Natl. Acad. Sci. USA 84:3962. Direct uptake of DNA into protoplasts using CaCl₂ precipitation, polyvinyl alcohol or poly-L-ornithine has also been reported. See, e.g., Hain, et al., (1985) Mol. Gen. Genet. 199:161 and Draper, et al., (1982) Plant Cell Physiol. 23:451.

[0159] Electroporation of protoplasts and whole cells and tissues has also been described. See, e.g., Donn, et al., (1990) Abstracts of the VIIth Int?. Congress on Plant Cell and Tissue Culture IAPTC, A2-38, p. 53; D'Halluin, et al., (1992) Plant Cell 4:1495-505 and Spencer, et al., (1994) Plant Mol. Biol. 24:51-61.

[0160] Increasing the Activity and/or Level of a Nitrate Uptake-Associated Polypeptide

[0161] Methods are provided to increase the activity and/or level of the nitrate uptake-associated polypeptide of the disclosure. An increase in the level and/or activity of the nitrate uptake-associated polypeptide of the disclosure can be achieved by providing to the plant a nitrate uptake-associated polypeptide. The nitrate uptake-associated polypeptide can be provided by introducing the amino acid sequence encoding the nitrate uptake-associated polypeptide into the plant, introducing into the plant a nucleotide sequence encoding a nitrate uptake-associated polypeptide or alternatively by modifying a genomic locus encoding the nitrate uptake-associated polypeptide of the disclosure.

[0162] As discussed elsewhere herein, many methods are known the art for providing a polypeptide to a plant including, but not limited to, direct introduction of the polypeptide into the plant, introducing into the plant (transiently or stably) a polynucleotide construct encoding a polypeptide having enhanced nitrogen utilization activity. It is also recognized that the methods of the disclosure may employ a polynucleotide that is not capable of directing, in the transformed plant, the expression of a protein or RNA. Thus, the level and/or activity of a nitrate uptake-associated polypeptide may be increased by altering the gene encoding the nitrate uptake-associated polypeptide or its promoter. See, e.g., Kmiec, U.S. Pat. No. 5,565,350; Zarling, et al., PCT/US93/03868. Therefore, mutagenized plants that carry mutations in nitrate uptake-associated genes, where the mutations increase expression of the nitrate uptake-associated gene or increase the nitrate uptake-associated activity of the encoded nitrate uptake-associated polypeptide are provided.

[0163] Reducing the Activity and/or Level of a Nitrate Uptake-Associated Polypeptide

[0164] Methods are provided to reduce or eliminate the activity of a nitrate uptake-associated polypeptide of the disclosure by transforming a plant cell with an expression cassette that expresses a polynucleotide that inhibits the expression of the nitrate uptake-associated polypeptide. The polynucleotide may inhibit the expression of the nitrate uptake-associated polypeptide directly, by preventing transcription or translation of the nitrate uptake-associated messenger RNA or indirectly, by encoding a polypeptide that inhibits the transcription or translation of a nitrate uptake-associated gene encoding nitrate uptake-associated polypeptide. Methods for inhibiting or eliminating the expression of a gene in a plant are well known in the art, and any such method may be used in the present disclosure to inhibit the expression of nitrate uptake-associated polypeptide. Many methods may be used to reduce or eliminate the activity of a nitrate uptake-associated polypeptide. In addition, more than one method may be used to reduce the activity of a single nitrate uptake-associated polypeptide.

[0165] 1. Polynucleotide-Based Methods:

[0166] In some embodiments of the present disclosure, a plant is transformed with an expression cassette that is capable of expressing a polynucleotide that inhibits the expression of a nitrate uptake-associated polypeptide of the disclosure. The term “expression” as used herein refers to the biosynthesis of a gene product, including the transcription and/or translation of said gene product. For example, for the purposes of the present disclosure, an expression cassette capable of expressing a polynucleotide that inhibits the expression of at least one nitrate uptake-associated polypeptide is an expression cassette capable of producing an RNA molecule that inhibits the transcription and/or translation of at least one nitrate uptake-associated polypeptide of the disclosure. The “expression” or “production” of a protein or polypeptide from a DNA molecule refers to the transcription and translation of the coding sequence to produce the protein or polypeptide, while the “expression” or “production” of a protein or polypeptide from an RNA molecule refers to the translation of the RNA coding sequence to produce the protein or polypeptide.

[0167] Examples of polynucleotides that inhibit the expression of a nitrate uptake-associated polypeptide are given below.

[0168] i. Sense Suppression/Cosuppression

[0169] In some embodiments of the disclosure, inhibition of the expression of a nitrate uptake-associated polypeptide may be obtained by sense suppression or cosuppression. For cosuppression, an expression cassette is designed to express an RNA molecule corresponding to all or part of a messenger RNA encoding a nitrate uptake-associated polypeptide in the “sense” orientation. Over expression of the RNA molecule can result in reduced expression of the native gene. Accordingly, multiple plant lines transformed with the cosuppression expression cassette are screened to identify those that show the greatest inhibition of nitrate uptake-associated polypeptide expression.

[0170] The polynucleotide used for cosuppression may correspond to all or part of the sequence encoding the nitrate uptake-associated polypeptide, all or part of the 5′ and/or 3′ untranslated region of a nitrate uptake-associated polypeptide transcript or all or part of both the coding sequence and the untranslated regions of a transcript encoding a nitrate uptake-associated polypeptide. In some embodiments where the polynucleotide comprises all or part of the coding region for the nitrate uptake-associated polypeptide, the expression cassette is designed to eliminate the start codon of the polynucleotide so that no protein product will be translated.

[0171] Cosuppression may be used to inhibit the expression of plant genes to produce plants having undetectable protein levels for the proteins encoded by these genes. See, for example, Broin, et al., (2002) Plant Cell 14:1417-1432. Cosuppression may also be used to inhibit the expression of multiple proteins in the same plant. See, for example, U.S. Pat. No. 5,942,657. Methods for using cosuppression to inhibit the expression of endogenous genes in plants are described in Flavell, et al., (1994) Proc. Natl. Acad. Sci. USA 91:3490-3496; Jorgensen, et al., (1996) Plant Mol. Biol. 31:957-973; Johansen and Carrington, (2001) Plant Physiol. 126:930-938; Broin, et al., (2002) Plant Cell 14:1417-1432; Stoutjesdijk, et al., (2002) Plant Physiol. 129:1723-1731; Yu, et al., (2003) Phytochemistry 63:753-763 and U.S. Pat. Nos. 5,034,323, 5,283,184 and 5,942,657, each of which is herein incorporated by reference. The efficiency of cosuppression may be increased by including a poly-dT region in the expression cassette at a position 3′ to the sense sequence and 5′ of the polyadenylation signal. See, US Patent Publication Number 2002/0048814, herein incorporated by reference. Typically, such a nucleotide sequence has substantial sequence identity to the sequence of the transcript of the endogenous gene, optimally greater than about 65% sequence identity, more optimally greater than about 85% sequence identity, most optimally greater than about 95% sequence identity. See, U.S. Pat. Nos. 5,283,184 and 5,034,323, herein incorporated by reference.

[0172] ii. Antisense Suppression

[0173] In some embodiments of the disclosure, inhibition of the expression of the nitrate uptake-associated polypeptide may be obtained by antisense suppression. For antisense suppression, the expression cassette is designed to express an RNA molecule complementary to all or part of a messenger RNA encoding the nitrate uptake-associated polypeptide. Over expression of the antisense RNA molecule can result in reduced expression of the native gene. Accordingly, multiple plant lines transformed with the antisense suppression expression cassette are screened to identify those that show the greatest inhibition of nitrate uptake-associated polypeptide expression.

[0174] The polynucleotide for use in antisense suppression may correspond to all or part of the complement of the sequence encoding the nitrate uptake-associated polypeptide, all or part of the complement of the 5′ and/or 3′ untranslated region of the nitrate uptake-associated transcript or all or part of the complement of both the coding sequence and the untranslated regions of a transcript encoding the nitrate uptake-associated polypeptide. In addition, the antisense polynucleotide may be fully complementary (i.e., 100% identical to the complement of the target sequence) or partially complementary (i.e., less than 100% identical to the complement of the target sequence) to the target sequence. Antisense suppression may be used to inhibit the expression of multiple proteins in the same plant. See, for example, U.S. Pat. No. 5,942,657. Furthermore, portions of the antisense nucleotides may be used to disrupt the expression of the target gene. Generally, sequences of at least 50 nucleotides, 100 nucleotides, 200 nucleotides, 300, 400, 450, 500, 550 or greater may be used. Methods for using antisense suppression to inhibit the expression of endogenous genes in plants are described, for example, in Liu, et al., (2002) Plant Physiol. 129:1732-1743 and U.S. Pat. Nos. 5,759,829 and 5,942,657, each of which is herein incorporated by reference. Efficiency of antisense suppression may be increased by including a poly-dT region in the expression cassette at a position 3′ to the antisense sequence and 5′ of the polyadenylation signal. See, US Patent Application Publication Number 2002/0048814, herein incorporated by reference.

[0175] iii. Double-Stranded RNA Interference

[0176] In some embodiments of the disclosure, inhibition of the expression of a nitrate uptake-associated polypeptide may be obtained by double-stranded RNA (dsRNA) interference. For dsRNA interference, a sense RNA molecule like that described above for cosuppression and an antisense RNA molecule that is fully or partially complementary to the sense RNA molecule are expressed in the same cell, resulting in inhibition of the expression of the corresponding endogenous messenger RNA.

[0177] Expression of the sense and antisense molecules can be accomplished by designing the expression cassette to comprise both a sense sequence and an antisense sequence. Alternatively, separate expression cassettes may be used for the sense and antisense sequences. Multiple plant lines transformed with the dsRNA interference expression cassette or expression cassettes are then screened to identify plant lines that show the greatest inhibition of nitrate uptake-associated polypeptide expression. Methods for using dsRNA interference to inhibit the expression of endogenous plant genes are described in Waterhouse, et al., (1998) Proc. Natl. Acad. Sci. USA 95:13959-13964, Liu, et al., (2002) Plant Physiol. 129:1732-1743 and WO 1999/49029, WO 1999/53050, WO 1999/61631 and WO 2000/49035, each of which is herein incorporated by reference.

[0178] iv. Hairpin RNA Interference and Intron-Containing Hairpin RNA Interference

[0179] In some embodiments of the disclosure, inhibition of the expression of a nitrate uptake-associated polypeptide may be obtained by hairpin RNA (hpRNA) interference or intron-containing hairpin RNA (ihpRNA) interference. These methods are highly efficient at inhibiting the expression of endogenous genes. See, Waterhouse and Helliwell, (2003) Nat. Rev. Genet. 4:29-38 and the references cited therein.

[0180] For hpRNA interference, the expression cassette is designed to express an RNA molecule that hybridizes with itself to form a hairpin structure that comprises a single-stranded loop region and a base-paired stem. The base-paired stem region comprises a sense sequence corresponding to all or part of the endogenous messenger RNA encoding the gene whose expression is to be inhibited and an antisense sequence that is fully or partially complementary to the sense sequence. Alternatively, the base-paired stem region may correspond to a portion of a promoter sequence controlling expression of the gene to be inhibited. Thus, the base-paired stem region of the molecule generally determines the specificity of the RNA interference. hpRNA molecules are highly efficient at inhibiting the expression of endogenous genes and the RNA interference they induce is inherited by subsequent generations of plants. See, for example, Chuang and Meyerowitz, (2000) Proc. Natl. Acad. Sci. USA 97:4985-4990; Stoutjesdijk, et al., (2002) Plant Physiol. 129:1723-1731 and Waterhouse and Helliwell, (2003) Nat. Rev. Genet. 4:29-38. Methods for using hpRNA interference to inhibit or silence the expression of genes are described, for example, in Chuang and Meyerowitz, (2000) Proc. Natl. Acad. Sci. USA 97:4985-4990; Stoutjesdijk, et al., (2002) Plant Physiol. 129:1723-1731; Waterhouse and Helliwell, (2003) Nat. Rev. Genet. 4:29-38; Pandolfini et al., BMC Biotechnology 3:7, and US Patent Application Publication Number 2003/0175965, each of which is herein incorporated by reference. A transient assay for the efficiency of hpRNA constructs to silence gene expression in vivo has been described by Panstruga, et al., (2003) Mol. Biol. Rep. 30:135-140, herein incorporated by reference.

[0181] For ihpRNA, the interfering molecules have the same general structure as for hpRNA, but the RNA molecule additionally comprises an intron that is capable of being spliced in the cell in which the ihpRNA is expressed. The use of an intron minimizes the size of the loop in the hairpin RNA molecule following splicing, and this increases the efficiency of interference. See, for example, Smith, et al., (2000) Nature 407:319-320. In fact, Smith, et al., show 100% suppression of endogenous gene expression using ihpRNA-mediated interference. Methods for using ihpRNA interference to inhibit the expression of endogenous plant genes are described, for example, in Smith, et al., (2000) Nature 407:319-320; Wesley, et al., (2001) Plant J. 27:581-590; Wang and Waterhouse, (2001) Curr. Opin. Plant Biol. 5:146-150; Waterhouse and Helliwell, (2003) Nat. Rev. Genet. 4:29-38; Helliwell and Waterhouse, (2003) Methods 30:289-295 and US Patent Application Publication Number 2003/0180945, each of which is herein incorporated by reference.

[0182] The expression cassette for hpRNA interference may also be designed such that the sense sequence and the antisense sequence do not correspond to an endogenous RNA. In this embodiment, the sense and antisense sequence flank a loop sequence that comprises a nucleotide sequence corresponding to all or part of the endogenous messenger RNA of the target gene. Thus, it is the loop region that determines the specificity of the RNA interference. See, for example, WO 2002/00904; Mette, et al., (2000) EMBO J 19:5194-5201; Matzke, et al., (2001) Curr. Opin. Genet. Devel. 11:221-227; Scheid, et al., (2002) Proc. Natl. Acad. Sci., USA 99:13659-13662; Aufsaftz, et al., (2002) Proc. Nat'l. Acad. Sci. 99(4):16499-16506; Sijen, et al., Curr. Biol. (2001) 11:436-440), herein incorporated by reference.

[0183] v. Amplicon-Mediated Interference

[0184] Amplicon expression cassettes comprise a plant virus-derived sequence that contains all or part of the target gene but generally not all of the genes of the native virus. The viral sequences present in the transcription product of the expression cassette allow the transcription product to direct its own replication. The transcripts produced by the amplicon may be either sense or antisense relative to the target sequence (i.e., the messenger RNA for the nitrate uptake-associated polypeptide). Methods of using amplicons to inhibit the expression of endogenous plant genes are described, for example, in Angell and Baulcombe, (1997) EMBO J. 16:3675-3684, Angell and Baulcombe, (1999) Plant J. 20:357-362 and U.S. Pat. No. 6,646,805, each of which is herein incorporated by reference.

[0185] vi. Ribozymes

[0186] In some embodiments, the polynucleotide expressed by the expression cassette of the disclosure is catalytic RNA or has ribozyme activity specific for the messenger RNA of the nitrate uptake-associated polypeptide. Thus, the polynucleotide causes the degradation of the endogenous messenger RNA, resulting in reduced expression of the nitrate uptake-associated polypeptide. This method is described, for example, in U.S. Pat. No. 4,987,071, herein incorporated by reference.

[0187] vii. Small Interfering RNA or Micro RNA

[0188] In some embodiments of the disclosure, inhibition of the expression of a nitrate uptake-associated polypeptide may be obtained by RNA interference by expression of a gene encoding a micro RNA (miRNA). miRNAs are regulatory agents consisting of about 22 ribonucleotides. miRNA are highly efficient at inhibiting the expression of endogenous genes. See, for example Javier, et al., (2003) Nature_{425:257}-263, herein incorporated by reference.

[0189] For miRNA interference, the expression cassette is designed to express an RNA molecule that is modeled on an endogenous miRNA gene. The miRNA gene encodes an RNA that forms a hairpin structure containing a 22-nucleotide sequence that is complementary to another endogenous gene (target sequence). For suppression of nitrate uptake-associated expression, the 22-nucleotide sequence is selected from a nitrate uptake-associated transcript sequence and contains 22 nucleotides of said nitrate uptake-associated sequence in sense orientation and 21 nucleotides of a corresponding antisense sequence that is complementary to the sense sequence. miRNA molecules are highly efficient at inhibiting the expression of endogenous genes and the RNA interference they induce is inherited by subsequent generations of plants.

[0190] 2. Polypeptide-Based Inhibition of Gene Expression

[0191] In one embodiment, the polynucleotide encodes a zinc finger protein that binds to a gene encoding a nitrate uptake-associated polypeptide, resulting in reduced expression of the gene. In particular embodiments, the zinc finger protein binds to a regulatory region of a nitrate uptake-associated gene. In other embodiments, the zinc finger protein binds to a messenger RNA encoding a nitrate uptake-associated polypeptide and prevents its translation. Methods of selecting sites for targeting by zinc finger proteins have been described, for example, in U.S. Pat. No. 6,453,242 and methods for using zinc finger proteins to inhibit the expression of genes in plants are described, for example, in US. Patent Application Publication Number 2003/0037355, each of which is herein incorporated by reference.

[0192] 3. Polypeptide-Based Inhibition of Protein Activity

[0193] In some embodiments of the disclosure, the polynucleotide encodes an antibody that binds to at least one nitrate uptake-associated polypeptide and reduces the enhanced nitrogen utilization activity of the nitrate uptake-associated polypeptide. In another embodiment, the binding of the antibody results in increased turnover of the antibody-nitrate uptake-associated complex by cellular quality control mechanisms. The expression of antibodies in plant cells and the inhibition of molecular pathways by expression and binding of antibodies to proteins in plant cells are well known in the art. See, for example, Conrad and Sonnewald, (2003) Nature Biotech. 21:35-36, incorporated herein by reference.

[0194] 4. Gene Disruption

[0195] In some embodiments of the present disclosure, the activity of a nitrate uptake-associated polypeptide is reduced or eliminated by disrupting the gene encoding the nitrate uptake-associated polypeptide. The gene encoding the nitrate uptake-associated polypeptide may be disrupted by any method known in the art. For example, in one embodiment, the gene is disrupted by transposon tagging. In another embodiment, the gene is disrupted by mutagenizing plants using random or targeted mutagenesis and selecting for plants that have reduced nitrogen utilization activity.

[0196] i. Transposon Tagging

[0197] In one embodiment of the disclosure, transposon tagging is used to reduce or eliminate the nitrate uptake-associated activity of one or more nitrate uptake-associated polypeptide. Transposon tagging comprises inserting a transposon within an endogenous nitrate uptake-associated gene to reduce or eliminate expression of the nitrate uptake-associated polypeptide. “nitrate uptake-associated gene” is intended to mean the gene that encodes a nitrate uptake-associated polypeptide according to the disclosure.

[0198] In this embodiment, the expression of one or more nitrate uptake-associated polypeptide is reduced or eliminated by inserting a transposon within a regulatory region or coding region of the gene encoding the nitrate uptake-associated polypeptide. A transposon that is within an exon, intron, 5′ or 3′ untranslated sequence, a promoter or any other regulatory sequence of a nitrate uptake-associated gene may be used to reduce or eliminate the expression and/or activity of the encoded nitrate uptake-associated polypeptide.

[0199] Methods for the transposon tagging of specific genes in plants are well known in the art. See, for example, Maes, et al., (1999) Trends Plant Sci. 4:90-96; Dharmapuri and Sonti, (1999) FEMS Microbiol. Lett. 179:53-59; Meissner, et al., (2000) Plant J. 22:265-274; Phogat, et al., (2000) J. Biosci. 25:57-63; Walbot, (2000) Curr. Opin. Plant Biol. 2:103-107; Gai, et al., (2000) Nucleic Acids Res. 28:94-96; Fitzmaurice, et al., (1999) Genetics 153:1919-1928). In addition, the TUSC process for selecting Mu insertions in selected genes has been described in Bensen, et al., (1995) Plant Cell 7:75-84; Mena, et al., (1996) Science 274:1537-1540 and U.S. Pat. No. 5,962,764, each of which is herein incorporated by reference.

[0200] ii. Mutant Plants with Reduced Activity

[0201] Additional methods for decreasing or eliminating the expression of endogenous genes in plants are also known in the art and can be similarly applied to the instant disclosure. These methods include other forms of mutagenesis, such as ethyl methanesulfonate-induced mutagenesis, deletion mutagenesis, and fast neutron deletion mutagenesis used in a reverse genetics sense (with PCR) to identify plant lines in which the endogenous gene has been deleted. For examples of these methods see, Ohshima, et al., (1998) Virology 243:472-481; Okubara, et al., (1994) Genetics 137:867-874 and Quesada, et al., (2000) Genetics 154:421-436, each of which is herein incorporated by reference. In addition, a fast and automatable method for screening for chemically induced mutations, TILLING (Targeting Induced Local Lesions In Genomes), using denaturing HPLC or selective endonuclease digestion of selected PCR products is also applicable to the instant disclosure. See, McCallum, et al., (2000) Nat. Biotechnol. 18:455-457, herein incorporated by reference.

[0202] Mutations that impact gene expression or that interfere with the function (enhanced nitrogen utilization activity) of the encoded protein are well known in the art. Insertional mutations in gene exons usually result in null-mutants. Mutations in conserved residues are particularly effective in inhibiting the activity of the encoded protein. Conserved residues of plant nitrate uptake-associated polypeptides suitable for mutagenesis with the goal to eliminate nitrate uptake-associated activity have been described. Such mutants can be isolated according to well-known procedures, and mutations in different nitrate uptake-associated loci can be stacked by genetic crossing. See, for example, Gruis, et al., (2002) Plant Cell 14:2863-2882.

[0203] In another embodiment of this disclosure, dominant mutants can be used to trigger RNA silencing due to gene inversion and recombination of a duplicated gene locus. See, for example, Kusaba, et al., (2003) Plant Cell 15:1455-1467.

[0204] The disclosure encompasses additional methods for reducing or eliminating the activity of one or more nitrate uptake-associated polypeptide. Examples of other methods for altering or mutating a genomic nucleotide sequence in a plant are known in the art and include, but are not limited to, the use of RNA:DNA vectors, RNA:DNA mutational vectors, RNA:DNA repair vectors, mixed-duplex oligonucleotides, self-complementary RNA:DNA oligonucleotides and recombinogenic oligonucleobases. Such vectors and methods of use are known in the art. See, for example, U.S. Pat. Nos. 5,565,350; 5,731,181; 5,756,325; 5,760,012; 5,795,972 and 5,871,984, each of which are herein incorporated by reference. See also, WO 1998/49350, WO 1999/07865, WO 1999/25821 and Beetham, et al., (1999) Proc. Natl. Acad. Sci. USA 96:8774-8778, each of which is herein incorporated by reference.

[0205] iii. Modulating Nitrogen Utilization Activity

[0206] In specific methods, the level and/or activity of a nitrate uptake-associated regulator in a plant is decreased by increasing the level or activity of the nitrate uptake-associated polypeptide in the plant. The increased expression of a negative regulatory molecule may decrease the level of expression of downstream one or more genes responsible for an improved nitrate uptake-associated phenotype.

[0207] Methods for increasing the level and/or activity of nitrate uptake-associated polypeptides in a plant are discussed elsewhere herein.

[0208] As discussed above, one of skill will recognize the appropriate promoter to use to modulate the level/activity of a nitrate uptake-associated in the plant. Exemplary promoters for this embodiment have been disclosed elsewhere herein.

[0209] In other embodiments, such plants have stably incorporated into their genome a nucleic acid molecule comprising a nitrate uptake-associated nucleotide sequence of the disclosure operably linked to a promoter that drives expression in the plant cell.

[0210] iv. Modulating Root Development

[0211] Methods for modulating root development in a plant are provided. By “modulating root development” is intended any alteration in the development of the plant root when compared to a control plant. Such alterations in root development include, but are not limited to, alterations in the growth rate of the primary root, the fresh root weight, the extent of lateral and adventitious root formation, the vasculature system, meristem development or radial expansion.

[0212] Methods for modulating root development in a plant are provided. The methods comprise modulating the level and/or activity of the nitrate uptake-associated polypeptide in the plant. In one method, a nitrate uptake-associated sequence of the disclosure is provided to the plant. In another method, the nitrate uptake-associated nucleotide sequence is provided by introducing into the plant a polynucleotide comprising a nitrate uptake-associated nucleotide sequence of the disclosure, expressing the nitrate uptake-associated sequence, and thereby modifying root development. In still other methods, the nitrate uptake-associated nucleotide construct introduced into the plant is stably incorporated into the genome of the plant.

[0213] In other methods, root development is modulated by altering the level or activity of the nitrate uptake-associated polypeptide in the plant. A change in nitrate uptake-associated activity can result in at least one or more of the following alterations to root development, including, but not limited to, alterations in root biomass and length.

[0214] As used herein, “root growth” encompasses all aspects of growth of the different parts that make up the root system at different stages of its development in both monocotyledonous and dicotyledonous plants. It is to be understood that enhanced root growth can result from enhanced growth of one or more of its parts including the primary root, lateral roots, adventitious roots, etc.

[0215] Methods of measuring such developmental alterations in the root system are known in the art. See, for example, US Patent Application Publication Number 2003/0074698 and Werner, et al., (2001) PNAS 18:10487-10492, both of which are herein incorporated by reference.

[0216] As discussed above, one of skill will recognize the appropriate promoter to use to modulate root development in the plant. Exemplary promoters for this embodiment include constitutive promoters and root-preferred promoters. Exemplary root-preferred promoters have been disclosed elsewhere herein.

[0217] Stimulating root growth and increasing root mass by decreasing the activity and/or level of the nitrate uptake-associated polypeptide also finds use in improving the standability of a plant. The term “resistance to lodging” or “standability” refers to the ability of a plant to fix itself to the soil. For plants with an erect or semi-erect growth habit, this term also refers to the ability to maintain an upright position under adverse (environmental) conditions. This trait relates to the size, depth and morphology of the root system. In addition, stimulating root growth and increasing root mass by altering the level and/or activity of the nitrate uptake-associated polypeptide also finds use in promoting in vitro propagation of explants.

[0218] Furthermore, higher root biomass production due to nitrate uptake-associated activity has a direct effect on the yield and an indirect effect of production of compounds produced by root cells or transgenic root cells or cell cultures of said transgenic root cells. One example of an interesting compound produced in root cultures is shikonin, the yield of which can be advantageously enhanced by said methods.

[0219] Accordingly, the present disclosure further provides plants having modulated root development when compared to the root development of a control plant. In some embodiments, the plant of the disclosure has an increased level/activity of the nitrate uptake-associated polypeptide of the disclosure and has enhanced root growth and/or root biomass. In other embodiments, such plants have stably incorporated into their genome a nucleic acid molecule comprising a nitrate uptake-associated nucleotide sequence of the disclosure operably linked to a promoter that drives expression in the plant cell.

[0220] v. Modulating Shoot and Leaf Development

[0221] Methods are also provided for modulating shoot and leaf development in a plant. By “modulating shoot and/or leaf development” is intended any alteration in the development of the plant shoot and/or leaf. Such alterations in shoot and/or leaf development include, but are not limited to, alterations in shoot meristem development, in leaf number, leaf size, leaf and stem vasculature, internode length and leaf senescence. As used herein, “leaf development” and “shoot development” encompasses all aspects of growth of the different parts that make up the leaf system and the shoot system, respectively, at different stages of their development, both in monocotyledonous and dicotyledonous plants. Methods for measuring such developmental alterations in the shoot and leaf system are known in the art. See, for example, Werner, et al., (2001) PNAS 98:10487-10492 and US Patent Application Publication Number 2003/0074698, each of which is herein incorporated by reference.

[0222] The method for modulating shoot and/or leaf development in a plant comprises modulating the activity and/or level of a nitrate uptake-associated polypeptide of the disclosure. In one embodiment, a nitrate uptake-associated sequence of the disclosure is provided. In other embodiments, the nitrate uptake-associated nucleotide sequence can be provided by introducing into the plant a polynucleotide comprising a nitrate uptake-associated nucleotide sequence of the disclosure, expressing the nitrate uptake-associated sequence and thereby modifying shoot and/or leaf development. In other embodiments, the nitrate uptake-associated nucleotide construct introduced into the plant is stably incorporated into the genome of the plant.

[0223] In specific embodiments, shoot or leaf development is modulated by altering the level and/or activity of the nitrate uptake-associated polypeptide in the plant. A change in nitrate uptake-associated activity can result in at least one or more of the following alterations in shoot and/or leaf development, including, but not limited to, changes in leaf number, altered leaf surface, altered vasculature, internodes and plant growth and alterations in leaf senescence, when compared to a control plant.

[0224] As discussed above, one of skill will recognize the appropriate promoter to use to modulate shoot and leaf development of the plant. Exemplary promoters for this embodiment include constitutive promoters, shoot-preferred promoters, shoot meristem-preferred promoters, and leaf-preferred promoters. Exemplary promoters have been disclosed elsewhere herein.

[0225] Increasing nitrate uptake-associated activity and/or level in a plant results in altered internodes and growth. Thus, the methods of the disclosure find use in producing modified plants. In addition, as discussed above, nitrate uptake-associated activity in the plant modulates both root and shoot growth. Thus, the present disclosure further provides methods for altering the root/shoot ratio. Shoot or leaf development can further be modulated by altering the level and/or activity of the nitrate uptake-associated polypeptide in the plant.

[0226] Accordingly, the present disclosure further provides plants having modulated shoot and/or leaf development when compared to a control plant. In some embodiments, the plant of the disclosure has an increased level/activity of the nitrate uptake-associated polypeptide of the disclosure. In other embodiments, the plant of the disclosure has a decreased level/activity of the nitrate uptake-associated polypeptide of the disclosure.

[0227] vi. Modulating Reproductive Tissue Development

[0228] Methods for modulating reproductive tissue development are provided. In one embodiment, methods are provided to modulate floral development in a plant. By “modulating floral development” is intended any alteration in a structure of a plant's reproductive tissue as compared to a control plant in which the activity or level of the nitrate uptake-associated polypeptide has not been modulated. “Modulating floral development” further includes any alteration in the timing of the development of a plant's reproductive tissue (i.e., a delayed or an accelerated timing of floral development) when compared to a control plant in which the activity or level of the nitrate uptake-associated polypeptide has not been modulated. Macroscopic alterations may include changes in size, shape, number, or location of reproductive organs, the developmental time period that these structures form or the ability to maintain or proceed through the flowering process in times of environmental stress. Microscopic alterations may include changes to the types or shapes of cells that make up the reproductive organs.

[0229] The method for modulating floral development in a plant comprises modulating nitrate uptake-associated activity in a plant. In one method, a nitrate uptake-associated sequence of the disclosure is provided. A nitrate uptake-associated nucleotide sequence can be provided by introducing into the plant a polynucleotide comprising a nitrate uptake-associated nucleotide sequence of the disclosure, expressing the nitrate uptake-associated sequence and thereby modifying floral development. In other embodiments, the nitrate uptake-associated nucleotide construct introduced into the plant is stably incorporated into the genome of the plant.

[0230] In specific methods, floral development is modulated by increasing the level or activity of the nitrate uptake-associated polypeptide in the plant. A change in nitrate uptake-associated activity can result in at least one or more of the following alterations in floral development, including, but not limited to, altered flowering, changed number of flowers, modified male sterility and altered seed set, when compared to a control plant. Inducing delayed flowering or inhibiting flowering can be used to enhance yield in forage crops such as alfalfa. Methods for measuring such developmental alterations in floral development are known in the art. See, for example, Mouradov, et al., (2002) The Plant Cell S111-S130, herein incorporated by reference.

[0231] As discussed above, one of skill will recognize the appropriate promoter to use to modulate floral development of the plant. Exemplary promoters for this embodiment include constitutive promoters, inducible promoters, shoot-preferred promoters and inflorescence-preferred promoters.

[0232] In other methods, floral development is modulated by altering the level and/or activity of the nitrate uptake-associated sequence of the disclosure. Such methods can comprise introducing a nitrate uptake-associated nucleotide sequence into the plant and changing the activity of the nitrate uptake-associated polypeptide. In other methods, the nitrate uptake-associated nucleotide construct introduced into the plant is stably incorporated into the genome of the plant. Altering expression of the nitrate uptake-associated sequence of the disclosure can modulate floral development during periods of stress. Such methods are described elsewhere herein. Accordingly, the present disclosure further provides plants having modulated floral development when compared to the floral development of a control plant. Compositions include plants having an altered level/activity of the nitrate uptake-associated polypeptide of the disclosure and having an altered floral development. Compositions also include plants having a modified level/activity of the nitrate uptake-associated polypeptide of the disclosure wherein the plant maintains or proceeds through the flowering process in times of stress.

[0233] Methods are also provided for the use of the nitrate uptake-associated sequences of the disclosure to increase seed size and/or weight. The method comprises increasing the activity of the nitrate uptake-associated sequences in a plant or plant part, such as the seed. An increase in seed size and/or weight comprises an increased size or weight of the seed and/or an increase in the size or weight of one or more seed part including, for example, the embryo, endosperm, seed coat, aleurone or cotyledon.

[0234] As discussed above, one of skill will recognize the appropriate promoter to use to increase seed size and/or seed weight. Exemplary promoters of this embodiment include constitutive promoters, inducible promoters, seed-preferred promoters, embryo-preferred promoters and endosperm-preferred promoters.

[0235] The method for altering seed size and/or seed weight in a plant comprises increasing nitrate uptake-associated activity in the plant. In one embodiment, the nitrate uptake-associated nucleotide sequence can be provided by introducing into the plant a polynucleotide comprising a nitrate uptake-associated nucleotide sequence of the disclosure, expressing the nitrate uptake-associated sequence and thereby increasing seed weight and/or size. In other embodiments, the nitrate uptake-associated nucleotide construct introduced into the plant is stably incorporated into the genome of the plant.

[0236] It is further recognized that increasing seed size and/or weight can also be accompanied by an increase in the speed of growth of seedlings or an increase in early vigor. As used herein, the term “early vigor” refers to the ability of a plant to grow rapidly during early development and relates to the successful establishment, after germination, of a well-developed root system and a well-developed photosynthetic apparatus. In addition, an increase in seed size and/or weight can also result in an increase in plant yield when compared to a control.

[0237] Accordingly, the present disclosure further provides plants having an increased seed weight and/or seed size when compared to a control plant. In other embodiments, plants having an increased vigor and plant yield are also provided. In some embodiments, the plant of the disclosure has a modified level/activity of the nitrate uptake-associated polypeptide of the disclosure and has an increased seed weight and/or seed size. In other embodiments, such plants have stably incorporated into their genome a nucleic acid molecule comprising a nitrate uptake-associated nucleotide sequence of the disclosure operably linked to a promoter that drives expression in the plant cell.

[0238] vii. Method of Use for Nitrate Uptake-Associated Polynucleotide, Expression Cassettes, and Additional Polynucleotides

[0239] The nucleotides, expression cassettes and methods disclosed herein are useful in regulating expression of any heterologous nucleotide sequence in a host plant in order to vary the phenotype of a plant. Various changes in phenotype are of interest including modifying the fatty acid composition in a plant, altering the amino acid content of a plant, altering a plant's pathogen defense mechanism, and the like. These results can be achieved by providing expression of heterologous products or increased expression of endogenous products in plants. Alternatively, the results can be achieved by providing for a reduction of expression of one or more endogenous products, particularly enzymes or cofactors in the plant. These changes result in a change in phenotype of the transformed plant.

[0240] Genes of interest are reflective of the commercial markets and interests of those involved in the development of the crop. Crops and markets of interest change, and as developing nations open up world markets, new crops and technologies will emerge also. In addition, as our understanding of agronomic traits and characteristics such as yield and heterosis increase, the choice of genes for transformation will change accordingly. General categories of genes of interest include, for example, those genes involved in information, such as zinc fingers, those involved in communication, such as kinases and those involved in housekeeping, such as heat shock proteins. More specific categories of transgenes, for example, include genes encoding important traits for agronomics, insect resistance, disease resistance, herbicide resistance, sterility, grain characteristics and commercial products. Genes of interest include, generally, those involved in oil, starch, carbohydrate, or nutrient metabolism as well as those affecting kernel size, sucrose loading, and the like.

[0241] In certain embodiments the nucleic acid sequences of the present disclosure can be used in combination (“stacked”) with other polynucleotide sequences of interest in order to create plants with a desired phenotype. The combinations generated can include multiple copies of any one or more of the polynucleotides of interest. The polynucleotides of the present disclosure may be stacked with any gene or combination of genes to produce plants with a variety of desired trait combinations, including but not limited to traits desirable for animal feed such as high oil genes (e.g., U.S. Pat. No. 6,232,529); balanced amino acids (e.g., hordothionins (U.S. Pat. Nos. 5,990,389; 5,885,801; 5,885,802 and 5,703,409); barley high lysine (Williamson, et al., (1987) Eur. J. Biochem. 165:99-106 and WO 1998/20122) and high methionine proteins (Pedersen, et al., (1986) J. Biol. Chem. 261:6279; Kirihara, et al., (1988) Gene 71:359 and Musumura, et al., (1989) Plant Mol. Biol. 12:123)); increased digestibility (e.g., modified storage proteins (U.S. patent application Ser. No. 10/053,410, filed Nov. 7, 2001) and thioredoxins (U.S. patent application Ser. No. 10/005,429, filed Dec. 3, 2001)), the disclosures of which are herein incorporated by reference. The polynucleotides of the present disclosure can also be stacked with traits desirable for insect, disease or herbicide resistance (e.g., Bacillus thuringiensis toxic proteins (U.S. Pat. Nos. 5,366,892; 5,747,450; 5,737,514; 5,723,756; 5,593,881; Geiser, et al., (1986) Gene 48:109); lectins (Van Damme, et al., (1994) Plant Mol. Biol. 24:825); fumonisin detoxification genes (U.S. Pat. No. 5,792,931); avirulence and disease resistance genes (Jones, et al., (1994) Science 266:789; Martin, et al., (1993) Science 262:1432; Mindrinos, et al., (1994) Cell 78:1089); acetolactate synthase (ALS) mutants that lead to herbicide resistance such as the S4 and/or Hra mutations; inhibitors of glutamine synthase such as phosphinothricin or basta (e.g., bar gene); and glyphosate resistance (EPSPS gene)) and traits desirable for processing or process products such as high oil (e.g., U.S. Pat. No. 6,232,529); modified oils (e.g., fatty acid desaturase genes (U.S. Pat. No. 5,952,544; WO 1994/11516)); modified starches (e.g., ADPG pyrophosphorylases (AGPase), starch synthases (SS), starch branching enzymes (SBE) and starch debranching enzymes (SDBE)) and polymers or bioplastics (e.g., U.S. Pat. No. 5,602,321; beta-ketothiolase, polyhydroxybutyrate synthase and acetoacetyl-CoA reductase (Schubert, et al., (1988) J. Bacteriol. 170:5837-5847) facilitate expression of polyhydroxyalkanoates (PHAs)), the disclosures of which are herein incorporated by reference. One could also combine the polynucleotides of the present disclosure with polynucleotides affecting agronomic traits such as male sterility (e.g., see, U.S. Pat. No. 5,583,210), stalk strength, flowering time or transformation technology traits such as cell cycle regulation or gene targeting (e.g., WO 1999/61619; WO 2000/17364; WO 1999/25821), the disclosures of which are herein incorporated by reference.

[0242] In one embodiment, sequences of interest improve plant growth and/or crop yields. For example, sequences of interest include agronomically important genes that result in improved primary or lateral root systems. Such genes include, but are not limited to, nutrient/water transporters and growth induces. Examples of such genes, include but are not limited to, maize plasma membrane H⁺-ATPase (MHA2) (Frias, et al., (1996) Plant Cell 8:1533-44); AKT1, a component of the potassium uptake apparatus in Arabidopsis, (Spalding, et al., (1999) J Gen Physiol 113:909-18); RML genes which activate cell division cycle in the root apical cells (Cheng, et al., (1995) Plant Physiol 108:881); maize glutamine synthetase genes (Sukanya, et al., (1994) Plant Mol Biol 26:1935-46) and hemoglobin (Duff, et al., (1997) J. Biol. Chem 27:16749-16752, Arredondo-Peter, et al., (1997) Plant Physiol. 115:1259-1266; Arredondo-Peter, et al., (1997) Plant Physiol 114:493-500 and references sited therein). The sequence of interest may also be useful in expressing antisense nucleotide sequences of genes that that negatively affects root development.

[0243] Additional, agronomically important traits such as oil, starch and protein content can be genetically altered in addition to using traditional breeding methods. Modifications include increasing content of oleic acid, saturated and unsaturated oils, increasing levels of lysine and sulfur, providing essential amino acids, and also modification of starch. Hordothionin protein modifications are described in U.S. Pat. Nos. 5,703,049, 5,885,801, 5,885,802 and 5,990,389, herein incorporated by reference. Another example is lysine and/or sulfur rich seed protein encoded by the soybean 2S albumin described in U.S. Pat. No. 5,850,016 and the chymotrypsin inhibitor from barley, described in Williamson, et al., (1987) Eur. J. Biochem. 165:99-106, the disclosures of which are herein incorporated by reference.

[0244] Derivatives of the coding sequences can be made by site-directed mutagenesis to increase the level of preselected amino acids in the encoded polypeptide. For example, the gene encoding the barley high lysine polypeptide (BHL) is derived from barley chymotrypsin inhibitor, U.S. patent application Ser. No. 08/740,682, filed Nov. 1, 1996 and WO 1998/20133, the disclosures of which are herein incorporated by reference. Other proteins include methionine-rich plant proteins such as from sunflower seed (Lilley, et al., (1989) Proceedings of the World Congress on Vegetable Protein Utilization in Human Foods and Animal Feedstuffs, ed. Applewhite (American Oil Chemists Society, Champaign, Ill.), pp. 497-502, herein incorporated by reference); corn (Pedersen, et al., (1986) J. Biol. Chem. 261:6279; Kirihara, et al., (1988) Gene 71:359, both of which are herein incorporated by reference) and rice (Musumura, et al., (1989) Plant Mol. Biol. 12:123, herein incorporated by reference). Other agronomically important genes encode latex, Floury 2, growth factors, seed storage factors and transcription factors.

[0245] Insect resistance genes may encode resistance to pests that have great yield drag such as rootworm, cutworm, European Corn Borer, and the like. Such genes include, for example, Bacillus thuringiensis toxic protein genes (U.S. Pat. Nos. 5,366,892; 5,747,450; 5,736,514; 5,723,756; 5,593,881 and Geiser, et al., (1986) Gene 48:109), and the like.

[0246] Genes encoding disease resistance traits include detoxification genes, such as against fumonosin (U.S. Pat. No. 5,792,931); avirulence (avr) and disease resistance (R) genes (Jones, et al., (1994) Science 266:789; Martin, et al., (1993) Science 262:1432 and Mindrinos, et al., (1994) Cell 78:1089), and the like.

[0247] Herbicide resistance traits may include genes coding for resistance to herbicides that act to inhibit the action of acetolactate synthase (ALS), in particular the sulfonylurea-type herbicides (e.g., the acetolactate synthase (ALS) gene containing mutations leading to such resistance, in particular the S4 and/or Hra mutations), genes coding for resistance to herbicides that act to inhibit action of glutamine synthase, such as phosphinothricin or basta (e.g., the bar gene) or other such genes known in the art. The bar gene encodes resistance to the herbicide basta, the nptII gene encodes resistance to the antibiotics kanamycin and geneticin and the ALS-gene mutants encode resistance to the herbicide chlorsulfuron.

[0248] Sterility genes can also be encoded in an expression cassette and provide an alternative to physical detasseling. Examples of genes used in such ways include male tissue-preferred genes and genes with male sterility phenotypes such as QM, described in U.S. Pat. No. 5,583,210. Other genes include kinases and those encoding compounds toxic to either male or female gametophytic development.

[0249] The quality of grain is reflected in traits such as levels and types of oils, saturated and unsaturated, quality and quantity of essential amino acids, and levels of cellulose. In corn, modified hordothionin proteins are described in U.S. Pat. Nos. 5,703,049, 5,885,801, 5,885,802 and 5,990,389.

[0250] Commercial traits can also be encoded on a gene or genes that could increase for example, starch for ethanol production, or provide expression of proteins. Another important commercial use of transformed plants is the production of polymers and bioplastics such as described in U.S. Pat. No. 5,602,321. Genes such as 13-Ketothiolase, PHBase (polyhydroxyburyrate synthase) and acetoacetyl-CoA reductase (see, Schubert, et al., (1988) J. Bacteriol. 170:5837-5847) facilitate expression of polyhyroxyalkanoates (PHAs).

[0251] Exogenous products include plant enzymes and products as well as those from other sources including procaryotes and other eukaryotes. Such products include enzymes, cofactors, hormones and the like. The level of proteins, particularly modified proteins having improved amino acid distribution to improve the nutrient value of the plant, can be increased. This is achieved by the expression of such proteins having enhanced amino acid content.

[0252] This disclosure can be better understood by reference to the following non-limiting examples. It will be appreciated by those skilled in the art that other embodiments of the disclosure may be practiced without departing from the spirit and the scope of the disclosure as herein disclosed and claimed.

### EXAMPLES

[0253] The following examples are offered to illustrate, but not to limit, the claimed subject matter. Various modifications by persons skilled in the art are to be included within the spirit and purview of this application and scope of the appended claims.

### Example 1

### Identification of Bacterial MFS Genes

[0254] The identification of bacterial MFS genes was initiated with a blast search against the GenBank non-redundant database (NR) and environmental database ENV_NR as well as GQPAT (patent database from GenomeQuest). 55 query sequences were used in this blast search. Forty five were identified based on known eukaryotic and prokaryotic HATS and LATS proteins and 10 query sequences were extracted from SWISSPROT, the knowledge protein sequence database.

### Details

[0255] 1. Search for HATS from diverse non-plant organisms.
[0256] a. Single component HATS
   [0257] i. 4 eukaryotes examples
   [0258] ii. 3 bacteria examples
[0259] b. Two component HATS
   [0260] i. 4 functional examples

[0261] 2. Identify pure functional LATS.
[0262] a. Search for functional LATs
   [0263] i. 11 Arabidopsis examples given (10 functional)
   [0264] ii. 14 maize examples given (2 functional)
   [0265] iii. 4 known PTRs given
[0266] b. Dual-affinity nitrate transporter AtNrt1.1. (1 example given)
   [0267] i. 1 functional Arabidopsis example given

[0268] Protein sequences identified by Blast searches were filtered to include sequences that are within the 400-650 amino acid in length. This is the length range found in the query sequences. Resulting sequences were clustered based on % sequence identity (% ID) and % query length overlap (% L). Clusters at 90%, 70%, 50%, 40% and 30% ID and 70% L were generated. A linkage (member of a cluster) is considered if identity >=% l threshold and query overlap >=70%). Four clusters were identified at the 30% ID and 70% L. One cluster (all HATS sequences) that contained a mix of eukaryotic and prokaryotic sequences was further analyzed. Fifty two candidate sequences were chosen based on phylogeny, cluster information—in the 40% to 90% ID range-, organism physiology and environment. Sequences derived from pathogens or potential pathogens were not included. Three major clusters including PTR/NRT1, MFS/NRT2, and NAR2 gene families were generated. The PTR/NRT1 cluster contains genes from eukaryotic organisms.

### Example 2

### Polypeptide Sequence Analysis

[0269] The current disclosed bacterial polypeptides from a variety of bacterial strains have common characteristics with MFS. The 11-residue containing MFS-specific sequence motif, GXXX(D/E)(R/K)XGX(R/K)(R/K) between transmembrane domain 2 and 3, was identified by Jessen-Marshall et al. using the lactose permease of E. coli as a representative model system (Jessen-Marshall et al., (1995) J. Biol. Chem. 270:16251-16257). The 52 disclosed bacterial polypeptide sequence alignment is shown in FIG. 2. A conserved motif, GMLXDRFGGRX, showed in the consensus sequence with 10 out of 11 residues matching the ones in predicted MFS-specific motif.

### Example 3

### Designing Constructs

[0270] The open reading frame (ORF) of individual bacterial MFS gene was codon optimized for maize expression and synthesized. A root-specific promoter, e.g., ZmRM2 promoter or constitutive promoter e.g., ZmUBI promoter, was used to make the expression cassette with SbGKAF as a terminator. The expression cassette was flanked by Gateway cloning sites and the co-integrate vector for Agrobacterial transformation was made using Gateway technology. The sequence was modified to be regulatory friendly if an ORF containing potential toxic and/or allergen sites.

### Example 4

### Nitrate Uptake Assay of Bacterial MFS Genes in Yeast

[0271] To test if bacterial MFS genes are functional in eukaryotic organisms, well-characterized bacterial nitrate transporters, e.g., NarK from E. coli (GenBank #NC_{—}000913) and NasA from Bacillus subtilis (Genbank #AL009126), were codon optimized for Pichia pastoris expression, synthesized, then cloned into P. pastoris expression vectors. (U.S. Patent publication 2008/0311612). The nitrate transporter activity from NarK and NasA was detected in yeast which indicates that bacterial MFS genes are able to uptake nitrate in eukaryotes.

[0272] Fifteen disclosed bacterial MFS genes including SEQ ID NO: 4, 8, 11, 12, 19, 20, 22, 24, 32, 33, 35, 38, 42, 50 and 52 with codon optimized for maize expression were evaluated in P. pastoris system for nitrate transporter activity. However, the nitrate uptake activity was undetectable which could be due to the difference of codon usage preference between maize and Pichia. The nitrate transporter assay on selected bacterial MFS genes with codon optimized for P. pastoris expression will reveal more complete information.

### Example 5

### T1 Reproductive Assay of Gaspe Flint Derived Maize Lines Under Water Limiting Conditions

[0273] Three events carrying PHP50688 (ZmRM2:ADHI Intron:NRT2.2 (BP) (SEQ ID NO: 4)) with GS3/GF3/GF3 background were also selected for T1 water use efficiency (WUE) reproductive assay under limited water application (75% reduced water). A split block design with stationary blocks was used to minimize spatial variation. For each event, the planting of 15 transgene positive seeds and 15 respective negative seeds were completely randomized within each event block. The seeds were planted in 4-inch pots containing 50% Turface and 50% SB300 soil mixture. Drought stress was applied by delivering a minimal amount of liquid fertilizer daily for an extended period of time. Ear shoot development was monitored and the ear shoots were covered with a shoot bag to prevent pollination at the first day of silk-exertion. The un-pollinated immature ears were hand harvested at 8 days after initial silking and analyzed by digital image. Various image processing operations may be performed, e.g., techniques or algorithms to delineate image pixels associated with the immature ear object of interest from the general image background and/or extraneous debris. Data information can be recorded for each whole or subsection of immature ear objects including, without limitation, object area, minor axis length, major axis length, perimeter, ear color and/or other information regarding ear size, shape, morphology, location or color. Results are analyzed for statistical significance by comparing transgenic positives vs the respective nulls. Significant increase in immature ear parameters or vegetative parameters indicates increased draught tolerance. Some transgenic positive plants expressing NRT2.2 (BP) (SEQ ID NO: 4) tend to have significant increased ear length, and/or silk numbers compared to non-transgenic nulls (FIG. 3).

### Example 6

### T1 Reproductive Assay of Gaspe Flint Derived Maize Lines Under Nitrogen Limiting Conditions

[0274] PHP50688 (ZmRM2:ADHI Intron:NRT2.2 (BP) (SEQ ID NO: 4), PHP50692 (ZmRM2:ADHI Intron:NRT2.1 (MN) (SEQ ID NO: 19), PHP50693 (ZmRM2:ADHI Intron:NRT2.1 (BP) (SEQ ID NO: 20), and PHP50697 (ZmRM2:ADHI Intron:NRT2.1 (PL) (SEQ ID NO: 38) were selected for T1 nitrogen use efficiency (NUE) reproductive assay under limited nitrate application (4 mm nitrate).

[0275] Three events from individual construct with GS3/GF3/GF3 background were assayed. A split block design with stationary blocks was used to minimize spatial variation. For each event, the planting of 15 transgene positive seeds and 15 respective negative seeds were completely randomized within each event block. The seeds were planted in 4-inch pots containing TURFACE®, a commercial potting medium and watered four times each day with 4 mm KNO₃ growth medium. Ear shoot development was monitored and the ear shoots were covered with a shoot bag to prevent pollination at the first day of silk-exertion. The un-pollinated immature ears were hand harvested at 8 days after initial sulking and analyzed by digital image. Various image processing operations may be performed, e.g., techniques or algorithms to delineate image pixels associated with the immature ear object of interest from the general image background and\or extraneous debris. Data information can be recorded for each whole or subsection of immature ear objects including, without limitation, object area, minor axis length, major axis length, perimeter, ear color and/or other information regarding ear size, shape, morphology, location or color. Results are analyzed for statistical significance by comparing transgenic positives vs the respective nulls. Significant increase in immature ear parameters or vegetative parameters indicates increased nitrogen use efficacy. Transgenic positive plants expressing PHP50688 (ZmRM2:ADHI Intron:NRT2.2 (BP) (FIG. 4A), PHP50692 (ZmRM2:ADHI Intron:NRT2.1 (MN) (FIG. 4B), PHP50693 (ZmRM2:ADHI Intron:NRT2.1 (BP) (FIG. 4C), and PHP50697 (ZmRM2:ADHI Intron:NRT2.1 (PL) (FIG. 4D) tend to have significant increased ear area, ear length, ear width, and/or silk numbers compared to non-transgenic nulls (FIG. 4).

### Example 7

### Nitrogen Use Efficiency (NUE) Assay

[0276] Seeds of Arabidopsis thaliana (control and transgenic line), ecotype Columbia, are surface sterilized (Sanchez, et al., 2002) and then plated on to Murashige and Skoog (MS) medium containing 0.8% (w/v) Bacto™-Agar (Difco). Plates are incubated for 3 days in darkness at 4° C. to break dormancy (stratification) and transferred thereafter to growth chambers (Conviron, Manitoba, Canada) at a temperature of 20° C. under a 16-h light/8-h dark cycle. The average light intensity is 120 ρE/m2/s. Seedlings are grown for 12 days and then transferred to soil based pots. Potted plants are grown on a nutrient-free soil LB2 Metro-Mix® 200 (Scott's Sierra Horticultural Products, Marysville, Ohio, USA) in individual 1.5-in pots (Arabidopsis system; Lehle Seeds, Round Rock, Tex., USA) in growth chambers, as described above. Plants are watered with 0.6 or 6.5 mM potassium nitrate in the nutrient solution based on Murashige and Skoog (MS free Nitrogen) medium. The relative humidity is maintained around 70%. Sixteen to eighteen days later, plant shoots are collected for evaluation of biomass and SPAD (chlorophyll) readings.

### Example 8

### Sucrose Growth Assay

[0277] The Columbia line of Arabidopsis thaliana is obtained from the Arabidopsis Biological Resource Center (Columbus, Ohio). For early analysis (Columbia and T3 transgenic lines), seed are surface-sterilized with 70% ethanol for 5 minutes followed by 40% Clorox® for 5 minutes and rinsed with sterile deionized water. Surface-sterilized seed are sown onto square Petri plates (25 cm) containing 95 mL of sterile medium consisting of 0.5 Murashige and Skoog (1962) salts (Life Technologies) and 4% (w/v) phytagel (Sigma). The medium contains no supplemental sucrose. Sucrose is added to medium in 0.1%, 0.5% and 1.5% concentration. Plates are arranged vertically in plastic racks and placed in a cold room for 3 days at 4° C. to synchronize germination. Racks with cold stratified seed are then transferred into growth chambers (Conviron, Manitoba, Canada) with day and night temperatures of 22 and 20° C., respectively. The average light intensity at the level of the rosette is maintained at 110 mol/m2/secl during a 16-hr light cycle development beginning at removal from the cold room (day 3 after sowing) until the seedlings are harvested on day 14. Images are taken and total fresh weight of root and shoot are measured.

### Example 9

### Low Nitrogen Seedling Assay Protocol

[0278] Seed of transgenic events are separated into transgene and null seed. Two different random assignments of treatments are made to each block of 54 pots arranged 6 rows of 9 columns using 9 replicates of all treatments. In one case null seed of 5 events of the same construct are mixed and used as control for comparison of the 5 positive events in this block, making up 6 treatment combinations in each block. In the second case, 3 transgenic positive treatments and their corresponding nulls are randomly assigned to the 54 pots of the block, making 6 treatment combinations for each block, containing 9 replicates of all treatment combinations. In the first case transgenic parameters are compared to a bulked construct null and in the second case transgenic parameters are compared to the corresponding event null. In cases where there are 10, 15 or 20 events in a construct, the events are assigned in groups of 5 events, the variances calculated for each block of 54 pots but the block null means pooled across blocks before mean comparisons are made.

[0279] Two seed of each treatment are planted in 4 inch, square pots containing TURFACE®-MVP on 8 inch, staggered centers and watered four times each day with a solution containing the following nutrients:

| | | | |
|---|---|---|---|
| 1 mM CaCl₂ | 2 mM MgSO₄ | 0.5 mM KH₂PO₄ | 83 ppm Sprint330 |
| 3 mM KCl | 1 mM KNO₃ | 1 uM ZnSO₄ | 1 uM MnCl₂ |
| 3 uM H₃BO₄ | 1 uM MnCl₂ | 0.1 uM CuSO₄ | 0.1 uM NaMoO₄ |

[0280] After emergence the plants are thinned to one seed per pot. Seedlings are harvested 18 days after planting. At harvest, plants are removed from the pots and the Turface washed from the roots. The roots are separated from the shoot, placed in a paper bag and dried at 70° C. for 70 hr. The dried plant parts (roots and shoots) are weighed and placed in a 50 ml conical tube with approximately 20 5/32 inch steel balls and ground by shaking in a paint shaker. Approximately, 30 mg of the ground tissue is hydrolyzed in 2 ml of 20% H₂O₂ and 6M H₂SO₄ for 30 minutes at 170° C. After cooling, water is added to 20 ml, mixed thoroughly, and a 50 μl aliquot removed and added to 950 μl 1M Na₂CO₃. The ammonia in this solution is used to estimate total reduced plant nitrogen by placing 100 μl of this solution in individual wells of a 96 well plate followed by adding 50 μl of OPA solution. Fluorescence, excitation=360 nM/emission=530 nM, is determined and compared to NH₄Cl standards dissolved in a similar solution and treated with OPA solution.

OPA solution—5 ul Mercaptoethanol+1 ml OPA stock solution
OPA stock—50 mg o-phthadialdehyde (OPA—Sigma #P0657) dissolved in 1.5 ml methanol+4.4 ml 1M Borate buffer pH9.5 (3.09 g H₃BO₄+1 g NaOH in 50 ml water)+0.55 ml 20% SDS

[0281] The following parameters are measured and means compared to null mean parameters using a Student's t test: total plant biomass; root biomass; shoot biomass; root/shoot ratio; plant N concentration; total plant N.

[0282] Variance is calculated within each block using a nearest neighbor calculation as well as by Analysis of Variance (ANOVA) using a completely random design (CRD) model. An overall treatment effect for each block is calculated using an F statistic by dividing overall block treatment mean square by the overall block error mean square.

### Example 10

### Transformation of Maize

### Biolistics

[0283] Polynucleotides contained within a vector can be transformed into embryogenic maize callus by particle bombardment, generally as described by Tomes, et al., Plant Cell, Tissue and Organ Culture: Fundamental Methods, Eds. Gamborg and Phillips, Chapter 8, pgs. 197-213 (1995) and as briefly outlined below. Transgenic maize plants can be produced by bombardment of embryogenically responsive immature embryos with tungsten particles associated with DNA plasmids. The plasmids typically comprise a selectable marker and a structural gene, or a selectable marker and a polynucleotide sequence or subsequence, or the like.

### Preparation of Particles

[0284] Fifteen mg of tungsten particles (General Electric), 0.5 to 1.8p, preferably 1 to 1.8p, and most preferably 1μ, are added to 2 ml of concentrated nitric acid. This suspension is sonicated at 0° C. for 20 minutes (Branson Sonifier Model 450, 40% output, constant duty cycle). Tungsten particles are pelleted by centrifugation at 10000 rpm (Biofuge) for one minute and the supernatant is removed. Two milliliters of sterile distilled water are added to the pellet, and brief sonication is used to resuspend the particles. The suspension is pelleted, one milliliter of absolute ethanol is added to the pellet and brief sonication is used to resuspend the particles. Rinsing, pelleting and resuspending of the particles are performed two more times with sterile distilled water and finally the particles are resuspended in two milliliters of sterile distilled water. The particles are subdivided into 250-μl aliquots and stored frozen.

### Preparation of Particle-Plasmid DNA Association

[0285] The stock of tungsten particles are sonicated briefly in a water bath sonicator (Branson Sonifier Model 450, 20% output, constant duty cycle) and 50 μl is transferred to a microfuge tube. The vectors are typically cis: that is, the selectable marker and the gene (or other polynucleotide sequence) of interest are on the same plasmid.

[0286] Plasmid DNA is added to the particles for a final DNA amount of 0.1 to 10 μg in 10 μL total volume and briefly sonicated. Preferably, 10 μg (1 μg/μL in TE buffer) total DNA is used to mix DNA and particles for bombardment. Fifty microliters (50 μL) of sterile aqueous 2.5 M CaCl₂ are added and the mixture is briefly sonicated and vortexed. Twenty microliters (20 μL) of sterile aqueous 0.1 M spermidine are added and the mixture is briefly sonicated and vortexed. The mixture is incubated at room temperature for 20 minutes with intermittent brief sonication. The particle suspension is centrifuged and the supernatant is removed. Two hundred fifty microliters (250 μL) of absolute ethanol are added to the pellet, followed by brief sonication. The suspension is pelleted, the supernatant is removed and 60 μl of absolute ethanol are added. The suspension is sonicated briefly before loading the particle-DNA agglomeration onto macrocarriers.

### Preparation of Tissue

[0287] Immature embryos of maize variety High Type II are the target for particle bombardment-mediated transformation. This genotype is the F1 of two purebred genetic lines, parents A and B, derived from the cross of two known maize inbreds, A188 and B73. Both parents were selected for high competence of somatic embryogenesis, according to Armstrong, et al., (1991) Maize Genetics Coop. News 65:92.

[0288] Ears from F1 plants are selfed or sibbed and embryos are aseptically dissected from developing caryopses when the scutellum first becomes opaque. This stage occurs about 9 to 13 days post-pollination and most generally about 10 days post-pollination, depending on growth conditions. The embryos are about 0.75 to 1.5 millimeters long. Ears are surface sterilized with 20% to 50% Clorox® for 30 minutes, followed by three rinses with sterile distilled water.

[0289] Immature embryos are cultured with the scutellum oriented upward, on embryogenic induction medium comprised of N6 basal salts, Eriksson vitamins, 0.5 mg/l thiamine HCl, 30 gm/l sucrose, 2.88 gm/l L-proline, 1 mg/l 2,4-dichlorophenoxyacetic acid, 2 gm/l Gelrite® and 8.5 mg/l AgNO₃ Chu, et al., (1975) Sci. Sin. 18:659; Eriksson, (1965) Physiol. Plant 18:976. The medium is sterilized by autoclaving at 121° C. for 15 minutes and dispensed into 100×25 mm Petri dishes. AgNO₃ is filter-sterilized and added to the medium after autoclaving. The tissues are cultured in complete darkness at 28° C. After about 3 to 7 days, most usually about 4 days, the scutellum of the embryo swells to about double its original size and the protuberances at the coleorhizal surface of the scutellum indicate the inception of embryogenic tissue. Up to 100% of the embryos display this response, but most commonly, the embryogenic response frequency is about 80%.

[0290] When the embryogenic response is observed, the embryos are transferred to a medium comprised of induction medium modified to contain 120 gm/l sucrose. The embryos are oriented with the coleorhizal pole, the embryogenically responsive tissue, upwards from the culture medium. Ten embryos per Petri dish are located in the center of a Petri dish in an area about 2 cm in diameter. The embryos are maintained on this medium for 3 to 16 hours, preferably 4 hours, in complete darkness at 28° C. just prior to bombardment with particles associated with plasmid DNA.

[0291] To effect particle bombardment of embryos, the particle-DNA agglomerates are accelerated using a DuPont PDS-1000 particle acceleration device. The particle-DNA agglomeration is briefly sonicated and 10 μl are deposited on macrocarriers and the ethanol is allowed to evaporate. The macrocarrier is accelerated onto a stainless-steel stopping screen by the rupture of a polymer diaphragm (rupture disk). Rupture is affected by pressurized helium. The velocity of particle-DNA acceleration is determined based on the rupture disk breaking pressure. Rupture disk pressures of 200 to 1800 psi are used, with 650 to 1100 psi being preferred and about 900 psi being most highly preferred. Multiple disks are used to affect a range of rupture pressures.

[0292] The shelf containing the plate with embryos is placed 5.1 cm below the bottom of the macrocarrier platform (shelf #3). To effect particle bombardment of cultured immature embryos, a rupture disk and a macrocarrier with dried particle-DNA agglomerates are installed in the device. The He pressure delivered to the device is adjusted to 200 psi above the rupture disk breaking pressure. A Petri dish with the target embryos is placed into the vacuum chamber and located in the projected path of accelerated particles. A vacuum is created in the chamber, preferably about 28 in Hg. After operation of the device, the vacuum is released and the Petri dish is removed.

[0293] Bombarded embryos remain on the osmotically-adjusted medium during bombardment, and 1 to 4 days subsequently. The embryos are transferred to selection medium comprised of N6 basal salts, Eriksson vitamins, 0.5 mg/l thiamine HCl, 30 gm/l sucrose, 1 mg/l 2,4-dichlorophenoxyacetic acid, 2 gm/l Gelrite®, 0.85 mg/l Ag NO₃ and 3 mg/l bialaphos (Herbiace, Meiji). Bialaphos is added filter-sterilized. The embryos are subcultured to fresh selection medium at 10 to 14 day intervals. After about 7 weeks, embryogenic tissue, putatively transformed for both selectable and unselected marker genes, proliferates from a fraction of the bombarded embryos. Putative transgenic tissue is rescued and that tissue derived from individual embryos is considered to be an event and is propagated independently on selection medium. Two cycles of clonal propagation are achieved by visual selection for the smallest contiguous fragments of organized embryogenic tissue.

[0294] A sample of tissue from each event is processed to recover DNA. The DNA is restricted with a restriction endonuclease and probed with primer sequences designed to amplify DNA sequences overlapping the ZmBZIP and non-ZmBZIP portion of the plasmid. Embryogenic tissue with amplifiable sequence is advanced to plant regeneration.

[0295] For regeneration of transgenic plants, embryogenic tissue is subcultured to a medium comprising MS salts and vitamins (Murashige and Skoog, (1962) Physiol. Plant 15:473), 100 mg/l myo-inositol, 60 gm/l sucrose, 3 gm/l Gelrite®, 0.5 mg/l zeatin, 1 mg/l indole-3-acetic acid, 26.4 ng/I cis-trans-abscissic acid and 3 mg/l bialaphos in 100×25 mm Petri dishes and is incubated in darkness at 28° C. until the development of well-formed, matured somatic embryos is seen. This requires about 14 days. Well-formed somatic embryos are opaque and cream-colored and are comprised of an identifiable scutellum and coleoptile. The embryos are individually subcultured to a germination medium comprising MS salts and vitamins, 100 mg/l myo-inositol, 40 gm/l sucrose and 1.5 gm/l Gelrite® in 100×25 mm Petri dishes and incubated under a 16 hour light:8 hour dark photoperiod and 40 meinsteins⁻²sec⁻¹ from cool-white fluorescent tubes. After about 7 days, the somatic embryos germinate and produce a well-defined shoot and root. The individual plants are subcultured to germination medium in 125×25 mm glass tubes to allow further plant development. The plants are maintained under a 16 hour light: 8 hour dark photoperiod and 40 meinsteinsm⁻²sec⁻¹ from cool-white fluorescent tubes. After about 7 days, the plants are well-established and are transplanted to horticultural soil, hardened off and potted into commercial greenhouse soil mixture and grown to sexual maturity in a greenhouse. An elite inbred line is used as a male to pollinate regenerated transgenic plants.

### Agrobacterium-Mediated

[0296] For Agrobacterium-mediated transformation, the method of Zhao, et al., may be employed as in PCT Patent Publication Number WO 1998/32326, the contents of which are hereby incorporated by reference. Briefly, immature embryos are isolated from maize and the embryos contacted with a suspension of Agrobacterium (step 1: the infection step). In this step the immature embryos are preferably immersed in an Agrobacterium suspension for the initiation of inoculation. The embryos are co-cultured for a time with the Agrobacterium (step 2: the co-cultivation step). Preferably the immature embryos are cultured on solid medium following the infection step. Following this co-cultivation period an optional “resting” step is contemplated. In this resting step, the embryos are incubated in the presence of at least one antibiotic known to inhibit the growth of Agrobacterium without the addition of a selective agent for plant transformants (step 3: resting step). Preferably the immature embryos are cultured on solid medium with antibiotic, but without a selecting agent, for elimination of Agrobacterium and for a resting phase for the infected cells. Next, inoculated embryos re cultured on medium containing a selective agent and growing transformed callus is recovered (step 4: the selection step). Preferably, the immature embryos are cultured on solid medium with a selective agent resulting in the selective growth of transformed cells. The callus is then regenerated into plants (step 5: the regeneration step) and preferably calli grown on selective medium are cultured on solid medium to regenerate the plants.

### Example 11

### Expression of Transqenes in Monocots

[0297] A plasmid vector is constructed comprising a preferred promoter operably linked to an isolated polynucleotide comprising a Bacterial MFS polynucleotide sequence or subsequence. This construct can then be introduced into maize cells by the following procedure.

[0298] Immature maize embryos are dissected from developing caryopses derived from crosses of maize lines. The embryos are isolated 10 to 11 days after pollination when they are 1.0 to 1.5 mm long. The embryos are then placed with the axis-side facing down and in contact with agarose-solidified N6 medium (Chu, et al., (1975) Sci. Sin. Peking 18:659-668). The embryos are kept in the dark at 27° C. Friable embryogenic callus, consisting of undifferentiated masses of cells with somatic proembryoids and embryoids borne on suspensor structures, proliferates from the scutellum of these immature embryos. The embryogenic callus isolated from the primary explant can be cultured on N6 medium and sub-cultured on this medium every 2 to 3 weeks.

[0299] The plasmid p35S/Ac (Hoechst Ag, Frankfurt, Germany) or equivalent may be used in transformation experiments in order to provide for a selectable marker. This plasmid contains the Pat gene (see, EP Patent Publication Number 0 242 236) which encodes phosphinothricin acetyl transferase (PAT). The enzyme PAT confers resistance to herbicidal glutamine synthetase inhibitors such as phosphinothricin. The pat gene in p35S/Ac is under the control of the 35S promoter from Cauliflower Mosaic Virus (Odell, et al., (1985) Nature 313:810-812) and comprises the 3′ region of the nopaline synthase gene from the T-DNA of the Ti plasmid of Agrobacterium tumefaciens.

[0300] The particle bombardment method (Klein, et al., (1987) Nature 327:70-73) may be used to transfer genes to the callus culture cells. According to this method, gold particles (1 μm in diameter) are coated with DNA using the following technique. Ten pg of plasmid DNAs are added to 50 μL of a suspension of gold particles (60 mg per mL). Calcium chloride (50 μL of a 2.5 M solution) and spermidine free base (20 μL of a 1.0 M solution) are added to the particles. The suspension is vortexed during the addition of these solutions. After 10 minutes, the tubes are briefly centrifuged (5 sec at 15,000 rpm) and the supernatant removed. The particles are resuspended in 200 μL of absolute ethanol, centrifuged again and the supernatant removed. The ethanol rinse is performed again and the particles resuspended in a final volume of 30 μL of ethanol. An aliquot (5 μL) of the DNA-coated gold particles can be placed in the center of a Kapton flying disc (Bio-Rad Labs). The particles are then accelerated into the corn tissue with a Biolistic™ PDS-1000/He biolistic particle delivery system (Bio-Rad Instruments, Hercules, Calif.), using a helium pressure of 1000 psi, a gap distance of 0.5 cm and a flying distance of 1.0 cm.

[0301] For bombardment, the embryogenic tissue is placed on filter paper over agarose-solidified N6 medium. The tissue is arranged as a thin lawn and covers a circular area of about 5 cm in diameter. The petri dish containing the tissue can be placed in the chamber of the PDS-1000/He approximately 8 cm from the stopping screen. The air in the chamber is then evacuated to a vacuum of 28 inches of Hg. The macrocarrier is accelerated with a helium shock wave using a rupture membrane that bursts when the He pressure in the shock tube reaches 1000 psi.

[0302] Seven days after bombardment the tissue can be transferred to N6 medium that contains glufosinate (2 mg per liter) and lacks casein or proline. The tissue continues to grow slowly on this medium. After an additional 2 weeks the tissue can be transferred to fresh N6 medium containing glufosinate. After 6 weeks, areas of about 1 cm in diameter of actively growing callus can be identified on some of the plates containing the glufosinate-supplemented medium. These calli may continue to grow when sub-cultured on the selective medium.

[0303] Plants can be regenerated from the transgenic callus by first transferring clusters of tissue to N6 medium supplemented with 0.2 mg per liter of 2,4-D. After two weeks the tissue can be transferred to regeneration medium (Fromm, et al., (1990) Bio/Technology 8:833-839).

### Example 12

### Expression of Transqenes in Dicots

[0304] Soybean embryos are bombarded with a plasmid comprising a preferred promoter operably linked to a heterologous nucleotide sequence comprising a Bacterial MFS polynucleotide sequence or subsequence as follows. To induce somatic embryos, cotyledons of 3 to 5 mm in length are dissected from surface-sterilized, immature seeds of the soybean cultivar A2872, then cultured in the light or dark at 26° C. on an appropriate agar medium for six to ten weeks. Somatic embryos producing secondary embryos are then excised and placed into a suitable liquid medium. After repeated selection for clusters of somatic embryos that multiply as early, globular-staged embryos, the suspensions are maintained as described below.

[0305] Soybean embryogenic suspension cultures can be maintained in 35 ml liquid media on a rotary shaker, 150 rpm, at 26° C. with fluorescent lights on a 16:8 hour day/night schedule. Cultures are sub-cultured every two weeks by inoculating approximately 35 mg of tissue into 35 ml of liquid medium.

[0306] Soybean embryogenic suspension cultures may then be transformed by the method of particle gun bombardment (Klein, et al., (1987) Nature (London) 327:70-73, U.S. Pat. No. 4,945,050). A DuPont Biolistic™ PDS1000/HE instrument (helium retrofit) can be used for these transformations.

[0307] A selectable marker gene that can be used to facilitate soybean transformation is a transgene composed of the 35S promoter from Cauliflower Mosaic Virus (Odell, et al., (1985) Nature 313:810-812), the hygromycin phosphotransferase gene from plasmid pJR225 (from E. coli; Gritz, et al., (1983) Gene 25:179-188) and the 3′ region of the nopaline synthase gene from the T-DNA of the Ti plasmid of Agrobacterium tumefaciens. The expression cassette of interest, comprising the preferred promoter and a heterologous Bacterial MFS polynucleotide, can be isolated as a restriction fragment. This fragment can then be inserted into a unique restriction site of the vector carrying the marker gene.

[0308] To 50 μl of a 60 mg/ml 1 μm gold particle suspension is added (in order): 5 μl DNA (1 μg/μl), 20 μl spermidine (0.1 M) and 50 μl CaCl₂ (2.5 M). The particle preparation is then agitated for three minutes, spun in a microfuge for 10 seconds and the supernatant removed. The DNA-coated particles are then washed once in 400 μl 70% ethanol and resuspended in 40 μl of anhydrous ethanol. The DNA/particle suspension can be sonicated three times for one second each. Five microliters of the DNA-coated gold particles are then loaded on each macro carrier disk.

[0309] Approximately 300-400 mg of a two-week-old suspension culture is placed in an empty 60×5 mm petri dish and the residual liquid removed from the tissue with a pipette. For each transformation experiment, approximately 5-10 plates of tissue are normally bombarded. Membrane rupture pressure is set at 1100 psi, and the chamber is evacuated to a vacuum of 28 inches mercury. The tissue is placed approximately 3.5 inches away from the retaining screen and bombarded three times. Following bombardment, the tissue can be divided in half and placed back into liquid and cultured as described above.

[0310] Five to seven days post bombardment, the liquid media may be exchanged with fresh media and eleven to twelve days post-bombardment with fresh media containing 50 mg/ml hygromycin. This selective media can be refreshed weekly. Seven to eight weeks post-bombardment, green, transformed tissue may be observed growing from untransformed, necrotic embryogenic clusters. Isolated green tissue is removed and inoculated into individual flasks to generate new, clonally propagated, transformed embryogenic suspension cultures. Each new line may be treated as an independent transformation event. These suspensions can then be subcultured and maintained as clusters of immature embryos or regenerated into whole plants by maturation and germination of individual somatic embryos.

### Example 13

### Field Trials under Nitrogen Stress and Normal Nitrogen Conditions

[0311] Corn hybrids containing a Bacterial MFS construct transgene are planted in the field under nitrogen-stress and normal-nitrogen conditions. Under normal nitrogen, a total of 250 lbs nitrogen is applied in the form of urea ammonium nitrate (UAN). Nitrogen stress is achieved through depletion of soil nitrogen reserves by planting corn with no added nitrogen for two years. Soil nitrate reserves are monitored to assess the level of depletion. To achieve the target level of stress, UAN is applied by fertigation or sidedress between V2 and VT growth stages, for a total of 50-150 lbs nitrogen.

[0312] Events from the construct are nested together with the null to minimize the spatial effects of field variation. Multiple reps are planted. The seed yield of events containing the transgene is compared to the yield of a transgenic null. Statistical analysis is conducted to assess whether there is a significant improvement in yield compared with the transgenic null, taking into account row and column spatial effects.

[0313] Differences in yield, yield components or other agronomic traits between transgenic and non-transgenic plants in reduced-nitrogen fertility plots may indicate improvement in nitrogen utilization efficiency contributed by expression of a transgenic event. Similar comparisons are made in plots supplemented with recommended nitrogen fertility rates. Effective transgenic events may achieve similar yields in the nitrogen-limited and normal nitrogen environments or may perform better than the non-transgenic counterpart in low-nitrogen environments.

[0314] In addition, the Bacterial MFS transgenic plants have increased sink capacity as result of mature ear length, mature ear width and kernel number per ear production. Realizing the yield potential may be achieved through increasing source strength and nutrient supply by either transgene manipulation or anronomic cultivation. Therefore, the Bacterial MFS transgenic may be used to increase yield under high N and fertilizer application, a condition most current commercial hybrids no longer respond to in yield increase, or plateau and are limited by sink capacity. Experiments where higher N levels per plant or higher photosynthetic activity per plants are created may demonstrate the value of combining Bacterial MFS with native germplasm, or other transgenic plants having more source production. The balance between sink size (kernel number/plant) and source size (photosynthetic carbon fixation) may be critical in securing commercial levels of improved yield.

### Example 14

### Evaluation of Construct for Effect on Yield Components

[0315] In order to measure the effect of transgene insertion on the yield components responsible for economic grain yield in maize, hybrid corn in grown under representative field conditions. The component values are measured in order to compare the plant results of the non-transformed plants, and/or wild type hybrids to the same hybrid containing the transgene insertion.

[0316] Plant seeds are planted in replicated field studies with common plant densities provided for all plots. Nutrient, water, insect control and weed control is provided to encourage good growth during the growing season. At maturity, measurements are performed on 10 sequential plants of the null and transgenic hybrids, including, but not limited to: number of ears, total number of kernels/plant, average weight per kernel. Calculations are performed to determine the total number of kernels produced/acre: kernels/plant×plants/acre, and uield (bu/acre): total kernels/acre X average weight/kernel. Constructs that improve one or more yield components, and/or calculated yield/acre would be deemed as having potential for improved commercial productivity in maize.

### Example 15

### Variant Sequences

[0317] Additional mutant sequences can be generated by known means including but not limited to truncations and point mutationa. These variants can be assessed for their impact on male fertility by using standard transformation, regeneration, and evaluation protocols.

[0318] A. Variant Nucleotide Sequences that do not Alter the Encoded Amino Acid Sequence

[0319] The disclosed nucleotide sequences are used to generate variant nucleotide sequences having the nucleotide sequence of the open reading frame with about 70%, 75%, 80%, 85%, 90% and 95% nucleotide sequence identity when compared to the starting unaltered ORF nucleotide sequence of the corresponding SEQ ID NO. These functional variants are generated using a standard codon table. While the nucleotide sequence of the variants is altered, the amino acid sequence encoded by the open reading frames does not change. These variants are associated with component traits that determine biomass production and quality. The ones that show association are then used as markers to select for each component traits.

[0320] B. Variant Nucleotide Sequences in the Non-Coding Regions

[0321] The disclosed nucleotide sequences are used to generate variant nucleotide sequences having the nucleotide sequence of the 5′-untranslated region, 3′-untranslated region or promoter region that is approximately 70%, 75%, 80%, 85%, 90% and 95% identical to the original nucleotide sequence of the corresponding SEQ ID NO. These variants are then associated with natural variation in the germplasm for component traits related to biomass production and quality. The associated variants are used as marker haplotypes to select for the desirable traits.

[0322] C. Variant Amino Acid Sequences of Disclosed Polypeptides

[0323] Variant amino acid sequences of the disclosed polypeptides are generated. In this example, one amino acid is altered. Specifically, the open reading frames are reviewed to determine the appropriate amino acid alteration. The selection of the amino acid to change is made by consulting the protein alignment (with the other orthologs and other gene family members from various species). An amino acid is selected that is deemed not to be under high selection pressure (not highly conserved) and which is rather easily substituted by an amino acid with similar chemical characteristics (i.e., similar functional side-chain). Using a protein alignment, an appropriate amino acid can be changed. Once the targeted amino acid is identified, the procedure outlined in the following section C is followed. Variants having about 70%, 75%, 80%, 85%, 90% and 95% nucleic acid sequence identity are generated using this method. These variants are then associated with natural variation in the germplasm for component traits related to biomass production and quality. The associated variants are used as marker haplotypes to select for the desirable traits.

[0324] D. Additional Variant Amino Acid Sequences of Disclosed Polypeptides

[0325] In this example, artificial protein sequences are created having 80%, 85%, 90% and 95% identity relative to the reference protein sequence. This latter effort requires identifying conserved and variable regions from an alignment and then the judicious application of an amino acid substitutions table. These parts will be discussed in more detail below.

[0326] Largely, the determination of which amino acid sequences are altered is made based on the conserved regions among disclosed protein or among the other disclosed polypeptides.

[0327] Based on the sequence alignment, the various regions of the disclosed polypeptide that can likely be altered are represented in lower case letters, while the conserved regions are represented by capital letters. It is recognized that conservative substitutions can be made in the conserved regions below without altering function. In addition, one of skill will understand that functional variants of the disclosed sequence of the disclosure can have minor non-conserved amino acid alterations in the conserved domain.

[0328] Artificial protein sequences are then created that are different from the original in the intervals of 80-85%, 85-90%, 90-95% and 95-100% identity. Midpoints of these intervals are targeted, with liberal latitude of plus or minus 1%, for example. The amino acids substitutions will be effected by a custom Perl script. The substitution table is provided below in Table 7.

TABLE 7
Substitution Table

| | Strongly | | |
|---|---|---|---|
| | Similar and | Rank of | |
| | Optimal | Order to | |
| Amino Acid | Substitution | Change | Comment |
| I | L, V | 1 | 50:50 substitution |
| L | I, V | 2 | 50:50 substitution |
| V | I, L | 3 | 50:50 substitution |
| A | G | 4 | |
| G | A | 5 | |
| D | E | 6 | |
| E | D | 7 | |
| W | Y | 8 | |
| Y | W | 9 | |
| S | T | 10 | |
| T | S | 11 | |
| K | R | 12 | |
| R | K | 13 | |
| N | Q | 14 | |
| Q | N | 15 | |
| F | Y | 16 | |
| M | L | 17 | First methionine cannot change |
| H | | Na | No good substitutes |
| C | | Na | No good substitutes |
| P | | Na | No good substitutes |

[0329] First, any conserved amino acids in the protein that should not be changed is identified and “marked off” for insulation from the substitution. The start methionine will of course be added to this list automatically. Next, the changes are made.

[0330] H, C and P are not changed in any circumstance. The changes will occur with isoleucine first, sweeping N-terminal to C-terminal. Then leucine, and so on down the list until the desired target it reached. Interim number substitutions can be made so as not to cause reversal of changes. The list is ordered 1-17, so start with as many isoleucine changes as needed before leucine, and so on down to methionine. Clearly many amino acids will in this manner not need to be changed. L, I and V will involve a 50:50 substitution of the two alternate optimal substitutions.

[0331] The variant amino acid sequences are written as output. Perl script is used to calculate the percent identities. Using this procedure, variants of the disclosed polypeptides are generating having about 80%, 85%, 90% and 95% amino acid identity to the starting unaltered ORF nucleotide sequence.

### Example 16

### Identification of new bacterial MFS Sequences

[0332] The 15 tested NRT sequences (SEQ ID NO: 4, 8, 11, 12, 19, 20, 22, 24, 32, 33, 35, 38, 42, 50 and 52) were used to search GenBank non-redundant database (NR) using the BLAST program. Protein sequences identified by Blast searches were filtered to include sequences that are within the 350 and 800 amino acids in length. Resulting sequences were clustered based on % sequence identity (% ID) and % query length overlap (% L). Clusters at 95′)/01D and 95% L were generated. The resulting sequences were aligned with ClustalW, default parameters and a phylogenetic tree was generated using Neighbor Joining algorithm in the JalView program.

[0333] Sequences adjacent to the 6 tested MFS sequences which showed ear traits efficacy at T0 generation and that belong to the same clade Genus/Family are claimed (Table 3 and 4).

### Example 17

### 3D Structure-Based Sequence Analysis and Modeling to Predict Gene Function of Bacterial MFS

[0334] X-ray crystal structures of two nitrate/nitrite transporters, NarK and NarU from E. coli, have been solved to high resolution (Yan et. al. (2013) Cell Rep., 3:716-723; Zheng et al. (2013) Nature 497:547-651), providing excellent modeling templates for microbial proteins. Consistent with previous sequence analysis, both NarK and NarU structures sharing 76% sequence identity reveal not only the typical fold of MFS (major facilitator superfamily) but the specialized structural features for NNP (nitrate/nitrite porter) family and even substrate binding site characteristics unique to nitrate/nitrite transporters as well. NarK and NarU structures comprise of 12 transmembrane helices (TMs) which can be divided into two domains, TMs 1-6 and TMs 7-12 corresponding to N-terminal and C-terminal halves, respectively. Both domains are related by a pseudo 2-fold axis parallel to the membrane normal and each domain is able to rotate as a rigid body relatively one another, enabling a rocker-switch or alternatively access mechanism to transport substrates. Distinct from other MFS families, all the NNP family proteins uniquely contain two short Gly-rich sequence segments named as nitrate signature motifs NS1 and NS2. Both NS1 (GGALGLNGGLGN₁₇₅ in NarK) on TM5 and NS2 (GFISAIGAIGGFF₄₂₀ in NarK) on TM11 are located at the center of the transporter and line part of the substrate transport pathway. These abundant Glys enable the TM5 and TM11 to tightly fit the relative small substrate (nitrate/nitrite) and also give the central helices enough flexibility for conformational switch during transporting. Similar to other MFS structures, the nitrate binding site is at the center of N- and C-domain interface. The bound nitrate salt-bridges to two positively charged Args (R87 and R303 in NarU), hydrogen-bonds to two polar residues (N173 and Y261) in planar, and is finally sandwiched by F145 and F367 (FIG. 7). Mutagenesis study showed all these substrate binding residues are essential for transporter activity. In sharp contrast to other known MFS structures, both NarK and NarU's transport pathways are positively charged and lack protonatable residue (Glu, Asp, or His), indicating they might not be proton-driven transporter. More likely, NarK and NarU are nitrate/nitrite exchanger or use different gradients such as sodium/potassium for pumping.

[0335] To gain the structural perspective, a comparison of all the 110 microbial proteins to NarK sequence and mapped out all the essential structural features among the proteins with decent to high similarity was performed. Based on fasta36 match of Nark against the 110 microbial sequences, 71 of them can be aligned to NarK decently with E value less than 1e-4 (Table 8). Of them, Seq ID NO 51 (gi:89108312) from E. coli is best matched with >76% identity and its 3D structure is modeled with homology method. All the 71 sequences with NarK (PDB:4jre) and NarU (4iu8) are aligned with clustalw2 algorithm. Using NarK and NarU as reference, all the structure features on the multiple sequence alignment were marked out. Clearly, all the sequences except SEQ ID NO 35 have the non disrupted 12 TMs. The SEQ ID NO 35's TM1 is truncated by half from N-terminal. Considering TM1 is lumen lining helix, SEQ ID NO 35 must have modified function. Another 70 sequences all have conserved NS1 and NS2 nitrate signature and the nitrate binding residues except SEQ ID NO 177 in which the polar N (corresponding to N173 in NarU) is replaced by hydrophobic M. Thus this protein has a different substrate.

[0336] Further examination was performed on substrate binding sites (Table 8). In addition to conserved binding residues, SEQ ID NO 39, 105, 41, 43, and 47's substrate binding sites have two negatively charged Glus from TM7 and TM10 like some sugar transporters. Likewise, at the same position as TM10's Glu, SEQ ID NO 24, 25, 27, 28, 30, 31, 21, 23 have a positively charged Lys facing the lumen. These proteins likely have different substrate specificity.

[0337] SEQ ID NO 181, 182, and 12 have a protonatable Glu on TM1 pointing to the lumen, making pH-driven transport possible.

[0338] Twenty-eight sequences (SEQ ID NO 13, 14, 15, 16, 18, 180, 17, 19, 126, 121, 122, 124, 125, 123, 108, 109, 107, 110, 111, 118, 120, 116, 113, 112, 117, 119, 115, and 20) have Asp in middle of TM1 facing the hydrophobic bilayer. Half of them (SEQ ID NO 108, 109, 107, 110, 111, 118, 120, 116, 113, 112, 117, 119, 115, and 20) also have Asp on TM9. As the charged residues are often prohibited to contact membrane core, the local helical conformation is likely disrupted. After a quarter turn twist of helical phase, these Asps could face to the lumen, likely altering the substrate and driven force specificity.

[0339] The remainder of the 25 sequences (SEQ ID NO 34, 33, 7, 9, 8, 5, 6, 2, 3, 1, 131, 132, 130, 129, 128, 4, 135, 133, 134, 127, 51, 183, 184, 10, and 11) have all the critical features of NarK/NarU and also lack the protonatble residues. They are more likely to function as NarK/NarU based on the structural analysis.

[0340] While the foregoing subject matter has been described in some detail for purposes of clarity and understanding, it will be clear to one skilled in the art from a reading of this disclosure that various changes in form and detail can be made without departing from the true scope of the disclosure. For example, all the techniques and apparatus described above can be used in various combinations. All publications, patents, patent applications and/or other documents cited in this application are incorporated by reference in their entirety for all purposes to the same extent as if each individual publication, patent, patent application and/or other document were individually indicated to be incorporated by reference for all purposes.

The application's sequence listing, which the Patent Office published only in electronic form, follows.

SEQUENCE LISTING (220 sequences)

SEQ ID NO: 1 - protein, 460 aa, Cupriavidus metallidurans
MSSSILTRWEPENVAFWRDQGERIAYRNLWISIPALMLAFVIWMLWSVVAVNLDRAGFQFTKNQLFWLTALPALSGATLRIFYSFLVPIFGGRRFTAISTALLLIPAVGMGFALRDPSTSYPTLLILALLCGLGGANFSSSMANISFFFPKEKKGLATGLNAGIGNLGVSVVQFVTPLVVSVAVFGALGGEPQTYKAADATQQLWLQNAGFIWVPFIIVASLAAWFGMHDIADARASFAEQAVIFTRKHNWLMCWLYIGTFGSFIGFSAGLALLTKSQFPGVNPTAYAFLGPLVGALTRPVGGWISDRLGGARVTLWTFIGMILAVFAVLAALPADGGAGSFPAFLGAFIVLFALTGIGNGSTFRMIPVIFLTERQRAAGKDAASQRQAVQDAGKESAAVLGFSGAIGAYGGFFIPKSFGTSLDLTGSPLAALYCFIVFYVTCVLVTWWFYARRNAAMPC

SEQ ID NO: 2 - protein, 457 aa, Geobacter lovleyi
MARVLTTWNPEDKEFWESEGKAIANRNLWISIPALLLAFSVWMVWSMVVVKLPLIGFQFDTNQLFWLAAVPALSGATLRIFYSFMVPIFGGRRWTAISTASLLIPAVGIGFAVRDHTTSYTTLLSLALLCGFGGGNFSSSMANISFFFPKAQKGTALGLNAGLGNLGVSAMQFLVPLAITAGVLGPVCGDPQVCVVNGATKQLWLQNAGFIWVPFIIIATIAAWFGMNDIADAKASFREQAVIFKRKHNWLMCWLYLGTFGSFIGFSAGFALLTKKLFPEIDPTQYAFLGPLVGAIARPIGGWISDKLGGARVTLWTFAAMVFAVFGVLAFLPHNGQGGSFFGFLIMFLILFTLTGIGNASTFRMIPIIYITEHQRNARGRSEVQINMDAAKEAAAALGFAGALGAYGGFFIPKSFGTSIAMTGGPEAALYGFIIFYMLCIVMTWWFYSRSNAEMPC

SEQ ID NO: 3 - protein, 457 aa, Geobacter lovleyi
MARILSTWTPEDKQFWEQEGKAVASRNLWISIPALLLAFAVWMVWSMVVVKLPDIGFSYTPNQLFWLAALPALSGATLRIFYSFMVPIFGGRRWTAISTASLLLPAIGIGFAVQNPGTSYSTMVILALLCGFGGGNFSSSMSNISFFYPKAQKGTALGMNAGLGNLGVSTMQFLVPVVITFGLFGSLGGEPQLWVKGVVTKQLWLQNAGFVWVPFIVIATIAAWFGMNDIASAKASFSEQAVIFRRKHNWLMCWLYLGTFGSFIGFSAGFALLTKKMFPAIDPTQYAFLGPLVGAIARPIGGWIADKLGGARVTFWTFIGMVLAVFGVLASMPTAASAGSFIMFMVMFMLLFTLTGVGNASTFRMIPIIYLTEHQRAATGRDEAQVNVDAAKEAAAALGFAGALGAYGGFFIPKSFGTSLAMTGSPNAALYGFIIFYVSCIIMTWWYYSRKNAPMPC

SEQ ID NO: 4 - protein, 469 aa, Burkholderia phymatum
MTTRPLLSHRGQTIHIWAPEDKAFWQREGEAIARLNLWISVPALFLAFAIWQVWSVVAVSLPSLGFRYSTNQLFWLAAAPALSGATLRIFYSFMVPLVGGRRWTALSTASLLIPAIGIGFAVQDNTTSYPTMLTLALLCGFGGGNFSSSMANISFFFPKERKGSALGVNAGLGNLGVSVVQFLSPLVVTAGVFGIFAGAPQTVGKGSQIVHVWTQNAAFIWVPWIALAALAAWFGMNDLAEAKASFADQAVIFRRRHNWLMCILYLGTFGSFIGYAAGFPLLIKSQFPTLDALAYAWVGPFVGAAVRPFGGWLADKLGGARVTLWNFVVMAGAVACVLVFLPSGPSHGSFAGFFASFLVLFLTTGIGNGSTFRMIPVIFLNTRLQEVAPSDKEAVQRATREGNTEAAAALGFAAAMGAYGGFFIPKSYGTSISLTGGPEAALYVFIAFYIVCIALTWWHYARRHAAMPC

SEQ ID NO: 5 - protein, 466 aa, Roseobacter denitrificans
MAITDTSNGSSRHVLTDWRPEDPQFWEEKGKAIATRNLWISIPNLLMAFSVWMVWSVVVAKMPAIGFDFSVSERFWLAALPGLSGATLRIFYSFVIPVFGGRRWTAISTASLLLPALGIGFAVQNPETSYFTFLILALMCGFGGGNFASSMANIAYFYPKKVKGQALAMNAGLGNLGVSVMQFLVPVVITMGVFGAVGGEPQTLSDGGQLFIQNAGFIWVPFLAIGAIAAWFGMNDIADAKASVGEQMSILGRYHNWVMCVLYVGTFGSFIGYAAGFPLLMKTQFPEVDVLKYAFLGPLVGALSRSATGWISDKFGGGKVTFWVFLGMIVAVYGVITFLPSTPEAADGSFWGFFACFMALFFLTGVGNASTFQMIPSIMKQEIPRLMPNLEATNMQRTIERESAAIIAFTSAIAAYGAFFIPKSYGTSIAITGSPHGALWAFLGFYAVCTVITWVYYSRKNAPVPC

SEQ ID NO: 6 - protein, 477 aa, Caulobacter sp.
MSRPQSMSTSKSGPVLTDWRPEDATFWSETGKRVATRNLWISVPNLLLAFSVWMVWSMVIAKLKLVGFKFTTEQLFWLAALPALSGATLRVFYSFMVPIVGGRRWTALATLSLLIPAIGIGIVVQHPETPYGVFVLLALACGLGGGNFASSMANISFFFPRSEKGAALGVNAGFGNLGVSVMQFLVPVVIGLALFGPLVGAPQTIVDHGVTKQIWLQNAAYVWVPFIVVAAVAAWFGMNDLTSAKASFAAQSVIFRRKHNWIMCWLYLGTFGSFLGFSAAFPLLTKTLFPDINVLQLAFLGPLIGAASRALTGGVSDRFGGERVTHWAFLALAAGVLGVLAGVGAYGAAPSFPIFFASFLWLFFWTGVGNASTFQMIPAIVRADMPRLMPQATVETRQRAAEMESAAIVGFTSAVGAFGGFFIPKAFGDSLKATGDPQFALYLFLGFYVSCVVVNWAVYGRKASLLHAPALIKVPAQ

SEQ ID NO: 7 - protein, 447 aa, Selenomonas ruminantium
MTTNAALSGLGDNPSRKEILRHWEPENAAFWERYGKRIANQNLAVSTWALVLSFVVWTLWATIAAKLNTVGFHFSDEQIFTLAALPGLVGATGRLFYTYLPGLLGGKTSTLITTALLLLPIIGLGNALQDTTTSYDTFVLLVAFIGIAGANFSASMANIGFFFPKANKGLALGINAGVGNLGVSLIYLTAPLLLGWNLSSVFGDGLLNAHGDMVYLQNVCYFWAVPTVITLALIALFMDNLPLPQQSPKSILAIFGNKHTWLMCWIYTCGFGSFIGFSAALVLLVAKEFPDVSFSMAAFLGPFIGAGVRPLGGWLADKMGSGSRVTLLSLFLMLGASLVTLMGIQAHNFMLFFGSFLVLFLTTGFINGASFRMIPYIFNNPFHASLVTGFTAAIAAYGAFLIPKIFGWAYASFQSVAPAFYILIGFTLITIVITWYFYDRKSSGLNC

SEQ ID NO: 8 - protein, 430 aa, Bacillus cellulosilyticus
MARITKWNPEDEHFWDTEGKYHARRNLWISIPSLFLAFAVWQIWSVVAVNLNDVGFSFTDRELFLLAALPGLTGATLRIIYTFLVPIFGGRNWTVISTASLLIPSVGIGIAVQNPDTPFITMAILAALCGFGGGNFSSSMSNISFFYPKKAKGTALGLNAGIGNLGVSAVQLLAPLVVTFALFGAFAGAPQYLGDGTQVYLQNAAFIWVIPIILTVIAAIFGMDNLPGTKASIKEQSVIFKNKHTWIMTWLYTMCFGSFIGYAAAFPLLIRTEFPEVNAMAFAFIGPFIGAAIRPLGGWLSDKLGGAFVTFWDIILMIGATLGVLYFYNAGNFTGFLIMFIVLFFATGIANGSTFRMIPFIFNQKEAAAVLGFTAAIAAYGAYLIPSIFGWSIDTTGTANLALYIFIAYYVISLVMNWYYYSRKNAEVKC

SEQ ID NO: 9 - protein, 431 aa, Bacillus cellulosilyticus
MEKLTVWNPEDNKFWEEKGKRIANKNLKISVFALILAFCIWQLWSVTATRLNDVGFNFTNSELFTLAALPGLTGATLRLVYTFLPGLLGGKKTTILTTVVLLIPAIGIGFAVQNPETSFFTMALLAALCGLGGGNLASSTATINPFFPKQSKGTANGINVGIGNLGVSVVQFVTPIVIGLGFIGAITGGAQILPDGSEVYIQNAAFIWVVPIIVATILTIFFMDELPNTKQSVKSQLSVLKLKHFWIMAWLYIMCFGSFIGFAAAFPLLIRAEFPEINAVAFAFLGPLIGASLRPAGGWLSDKVNSGARVTFWTIIVMMLGTGGAIFFLNIQNFIGFLISFLLLFAGTGIANGSTFRMVPYIVEEKQAAPVMGLIAALAAYGAFFIPKIFGWSIESTGNANVALIIFICYYLVSLAVCWYWYTRKGCGQHC

SEQ ID NO: 10 - protein, 530 aa, Halomonas halodenitrificans
MTRKNADIERWDVENEEFWESEGKRVANRNLWISIPSLLLGFAVWLMWGMITTQMQNLGFPFSVDQLFTLTAIAGLAGATLRIPASFMIRIAGGRNTIFLTTALLMVPALGTGIALMTPQTPFWVFQVLALLSGIGGGNFANSMSNISNFFPKKQQGYALGMNAGLGNFGVTTMQILIPLVMTVGLFGAFGGDAMELEKASGTLIGRIEAGTDTWIQNAGLVWMLLLIPLAFAGWFGMNNLRTITPNSGSPLQAFGKILGLYGVGVVTSIVGVVALGYLNMWVALPLTIVLTVVLLRLIPGDIKPAIKKQFEIFSNKHTWSMTVLYIATFGSFIGFSAALPLSISVIFGNMMEVAADGSMVRVANPDAPSALTWAWMGPFVGALIRPVGGWISDKLGGSIVTQVITAIMVVGSVAAGYVMMLAYNSTDPNQYFWMFLLLFILLFAASGIGNGSTFRSIGFIFDPQQKGPALGWTSAVAAYGSFIAPRVMGEQIKAGTPELAMYGFAVFYAVCLLVNWWFYLRPGAYVKNP

SEQ ID NO: 11 - protein, 477 aa, Corynebacterium efficiens
MTLAGHAVLDWFQCSHGRVSGTPFDPNQKRHKVTELNTKGKTLHGWDPEVPEQWDSRIAWRTLAITTFSLIIGFSVWYLVSAIAPLLNRIGFDLSAAQLYWLTAVPGLAGGILRLVFMFLPARIGTRNLVGFSSALFLIPMFGWFLAVQNANTPYWWLLVLAAMTGIGGGCFSGYMPSTGWFFPKAKSGTALGIQAGVGNLGVSVIQFLGPWVMGFGLLGIGFITPQRTVEGSEVFVHNAAIVLVPWAMLASVLAFLFLKDIPMKVNFRDQLNFFRNKNTWILSIVYMMTFGAFAGFAAQFGLIINNHFGIASPMAEQFPAEALHAGATYAFLGPLISALVRAGWGPLCDKFGGAVWTFVSGVGMIASTVAAAIFLSRAETPDDFYPFLWSMLALFFFTGIGNAGTFKQMPMILPRKQAGGVIGWTGAIGAFGPFVVGVLLSMTPTVTFYWGCVVFFTIATALTWIYYARPNAPFPG

SEQ ID NO: 12 - protein, 455 aa, Salinispora tropica
MTTSVPATRTAEEIDLQRGRGRWIGHWAPEDDHFWRTAGRAVARRNLIFSIFAEHIGFSVWLLWSIVVVRLGDVGWTLTTSQALWLTAVPSGVGALLRLPYTFAVPVFGGRNWTVISALLLIIPAAGLAWAVQHPEIGFVPLLLIAATAGFGGGNFASSMANISFFYPEREKGWALGLNAAGGNIGVAVVQFLVPQVIVLGGGLALARAGLMYLPLAVIAAVCAYLFMDNLAEAKADVGPVWSSLRDRNTWIMSLLYVGTFGSFIGYSAAFPTLLNGVFGRPDIALSWAFLGAAVGSLCRPFGGRLADTIGGARVTVASFMLMTAGAYLALWSVRERWLELFFLAFMVLFVATGVGNGSTYRMISRIFQVRGEELGGSPEIMRAMRRQAAGALGIISAIGAFGGFLVPICYAWAKSAYGSIQPALWFYVGFFLVLTALTWAVYLRPGARLASARV

SEQ ID NO: 13 - protein, 401 aa, Bacillus licheniformis
MKLADLRKSGHAPSLLSSFLYFDVSFMIWVLLGALGVYVTADFDLSPSQVGLIVAIPTLAGSFFRIALGILTDRFGPKKTAVGGMLVTMIPLLWGWQFGSSVAELYIIGILLGVAGASFSASLPMASRWYPPHLQGLAMGIAGAGNSGTLLATLFGPRLAEQVGWNGVMGLALIPLTLVLFSYFLMAKEPPNQPAPKPLKDYFAVFKERDTWYFCLLYSVTFGGFVGLSNFLSYFFASQYAVPAVRAGEFVTLVVASGSCLRPVGGLIADKIGGVRLLQFLFIGVALCMFSVSMLPSLGVVTAALFIGMGCLGMGNGAIFQFVPQRFQQEIGMVTGIVGAAGGIGGFFLPNILGTLKQITGTYSSGFLTFTVIAFLALGLLLFAQAGWKKQWKAEEKSIRI

SEQ ID NO: 14 - protein, 408 aa, Geobacillus sp.
MEKKGFWQSGHKPSLFGAFLYFDISFMIWGMLGPLAVVIAGDYPMDPVQKANLVALPVLGGSILRLVLGFLADRIGPKLTAQIGMVVTLVPLLLGWLWVDSLDQLYVVAILLGVAGASFAAALPLAGQWYPKEHQGLAMGIAGAGNSGTVLATLFANRLAQHFGSWEIVFGLAIIPIVLVFIYFSVFARNSPNRPAPKRLSEYGNVLKQRDAWVFCALYCVTFGGFVGLANYLTIFFNAQYGLSAVQAADITTICVIAGSFFRPVGGFLADRIGGSRMLMFLYAGAAIMLIGVSFLPPLWLVVTLLFIGMMCLGAGNGSVFQLVPQRFAGEIGLVTGIVGAAGGLGGYALPLILGRLYQATGSYTAGFIILSFIAAASLALTIVMQLKWRRSWLRGVPSGAQTGSAEA

SEQ ID NO: 15 - protein, 406 aa, Caulobacter sp.
MLSRDFLKAGHTPTLFAAFLYFDLSFMVWVILGPLGVAIAKDFHLDPAQKGLMVAVPVLAGALLRLVNGVLVDRIGPKKTGMISQLIVLTGLVLAWFLGIHNYHQVLALGLVLGVAGASFAVALPLASRWYPQEHQGLALGIAGAGNSGTALAALFAPILAKHFGWQNVIGLAAIPLAVAFVVYMLLAKDAPEQPAPKKLAEYMDVLKVPDAWWLMLLYAVTFGGFVGLASSLTIYFNAEYGLTPVTAGFFTAACVFAGSFIRPVGGALADRFGGVRTLTIVFALAALGLATASFQMPSAWIALAVLMFSMLALGAGNGAVFQLAPQRFRKEIGVMTGLIGMTGGIGGFYLASSLGMAKKLTGSYQIGFLGFAALAVFALVALHSLKARWRAVWPTLHGDAAPVRV

SEQ ID NO: 16 - protein, 404 aa, Azoarcus sp.
MDKKSFLQAGHTPTLFAAFMYFDLAFMVWVMLGPLGVQIATDLGLTHAQKGMMVATPVLAGALLRFVMGMLVDHLKPKLTGAIGQVIVIAALAYAWQHGIHSFEETLILGLFLGVAGASFAVALPLASRWYPPEHQGTALGIAGAGNSGTALAALFGPGLAASFGWVNVFGLALIPLGLVFVAYLLMAKDAPECPPPKRLGEYLAVLKDKDAWWFMFFYSVTFGGFVGLASSLTIYFNTQYGLDAKMAGYFTAACVFAGSLVRPIGGNLADRIGGIKSLSVVYIAAAVALSIVSVGLPSSWLALAVFVCAMLSLGMGNGAVFQLVPQRFRKEIGVMTGLVGMAGGVGGFYLASSLGYSKQVSGSYMPGFLIFAGLALAALVGLTAVKRRWRTTWGAPHLTTAKI

SEQ ID NO: 17 - protein, 411 aa, Xanthomonas campestris
MAIAFGDASMQRSFWRSGHTPTLFASFLYFDLSFMVWYLLGPLQVPIAQALGLDTQQRALMVAVPILCGAVLRLVLGMLADRIGAKRAGVVAQLAVIASLFGAWQLGVHSMGQVLLLGVLLGIAGASFAVALPLASRWYPPEHQGTAMGIAGAGNSGTVLAALFAPMLALAFGYQNVFGLACIPLVLTLLVFVLIAREAPIPVARKRWADYGRVLVGNRDAWRFMFFYSVTFGGFSGFASALPGYFHDQFGFDARTAGWATAACVLAGSVMRPLGGVIADRVGGTRALLAVYLLVATLVGIAGFGAGGATITLGLFVLTLLCLGAGNGAVFQLVPQRFGQDIGVMTGLIGMAGGIGGFALAAGLGVLKQHTGSYAIGMWLFAAFALGGWALLAGVKTQWRSEWSTAGAARV

SEQ ID NO: 18 - protein, 403 aa, Pseudomonas stutzeri
MSTSFWKAGHAPTLFASFLYFDLSFMVWYVLGPLGVQIAADLGLTTQQRAFMVATPILAGAVLRLALGILADRTSPKTAGLFGQSVVIVALLVAWLHGINSYEQALLLGLFLGMAGASFAVALPLASQWYPAEHQGKAMGIAGAGNSGTVLAALFAPVLAAIFGWNNVFGLALIPLVLTLIIFASVAKNAPNRPAPKSLADYMKALGDRDSWWFMFFYSVTFGGFLGLASTLPGYFHDQYAFDPVKAGYYTAACVFAGSLLRPLGGALADRIGGIRALLVMYTVAAICIAAVGFNLPSSTAALALFVVAMLSLGAGNGAVFQLVPQRFNKEIGVMTGLVGMAGGIGGFLLTAGLGAVKQSTGDYQFGLWLFASLGVLAWFGLHGVKRRWRTTWGSAAVTAARV

SEQ ID NO: 19 - protein, 421 aa, Methylobacterium nodulans
MASFKTVMKSGHPPTLFAAFLYFDFCFAIWVLNGAMGPFITETYRLTPAQTGFMISLPILAGAIMRFPLGVLAQYIGRKNAAITEMALIILAMAYGFFVVSSYGDVLAMGVLLGIAGASFGVALSLGSGWFPAQHKGLAMGIAGAGNSGTVLAVLFAPPLAQAYGWQAVYGFAGVVMILPLLVMIIFAKEPPDREHQSFREHISCLFEKDGWAFNLIYVITFGGFIGLSNFLPTFFYEQFAVTKVEAGRLTMLAALMGSGIRVVGGYFADRLGGILVLTVVLLAAVGSFLLLTATPPLLLTTILFMVCFAALGAGNGALFQLVPLRWPSNTAVAGSMIGEIGALGGAILPNAMGLSKQFTGGFAAGFVGYAVFTAVVLGCLTLWSRQWVGRWVGPRGKVLAAGTASAQAEGDLLPAAAQRA

SEQ ID NO: 20 - protein, 465 aa, Burkholderia phymatum
MKNLLNSLASGNWRALLACFLYFDTGFTVWVMFGPLAPFINKSIAMSPAELGFLVAVPVLGAAILRVTLGNLYQACDGRRVALMGVALSAIPSIVLLLMPGAPSYTLLLILGVFLGVGGASFAVALPMAGSNYPPKVQGLVLGLAAAGNIGAVLDGFMFPALADHFGWAKAAGAALPLLGLAAVALFFWARDLGQKTGSGAQALRSFIVTLAGLVALVVAVHAGVFGAGKTGVLLLPVLGALLAIAVLPKHYRSVLVEGDTWVVMLVYSITFGGFVGMSSYVTTLLISLYQMPRLEAGLFMSLLACIGALVRPIGGLVADRISGVRALVILLAAISLCDFLFAAWMPPVSAGIALLIAMYVCFGLGNGATFQLVPQRWKGKTGLMSGIVGAAGGIGGFYLPVIMGIAKEGTGSYQMGFATFGVLSALAFGLVVLHRARWLEWALPKESAVVIEPIRAGISVDSGA

SEQ ID NO: 21 - protein, 472 aa, Salinispora tropica
MYVKPAPDDSTPDETATEQNSRNDRGRTRVLTLSTIGFTVMFAVWLMFGILGKPISEEFGLSEVQLSWIIAAAVLNGSLWRLPAGIVADRVGGRRVMTAMLLLTAVASFLVSRADSYAMLLVLAFLVGFAGNSFTAGIAWNSAWQPREKQGFALGLFGAGNVGASVTKFIGPPLIAGTAGATYLGVVEGGWRLVPVVYAVLLLALAAATWFITPRQDRVPSHGTPLRTQLEPLKQLRVWRFSLYYVAVFGAYVALAAWLPTYYMNNYDVSLQTAAYLTALYIFPASLLRPVGGSLSDRLGARRVMYWTFGLMLLSTGILMMPPGHIVVDHPDGTQTTHLAYQLGIVPFTLLVVLLGCAMGIGKAAVYKHIPEYFPRQVGAVGGLVGMLGGLGGFFLPPLFAYTKAWTGLPSSTFLVLFVLTVICAVWMHLTVVRMLHGESPQLATHFEKPEPADQPAAPASAATRASKEAHV

SEQ ID NO: 22 - protein, 433 aa, Corynebacterium efficiens
MTNARDHHTPLTTDPPVATSPTRETPGAYRVLTMATLGFTLMFAAWMMFGVLGIPIQEEFGLTDVQLSLISSVAILNGSLWRLPAGIIADRLGGRIVMTVLLVASAVFSYMVSLADSYSMLLGLAFAVGLAGNSFSVGNTWVAAWFSKRRNGLAMGVFGAGNVGASVTKFIGPVIIAATAGSLYFGGLVEGGWRLVPVIYAVALLATAVMLWFITPAQDKKPGQGRKLSEMLAPLKQGRVWRFSLYYVAVFGAYVALSSWMPKYYIDMYGVSTSTAALLTALFIFPASLMRPVGGSLSDRFGARQTTIFALLIMLTASGILALPLTINIVLFTLLLFTLGVGMGIGKASVFKYIPDYFPGNVGSVGGLVGMFGGLGGAFLPPLFAGVKTATGLEQATFLVIFVLVAFCLAWLLRAISLMKRTSPDPLWRRFGI

SEQ ID NO: 23 - protein, 506 aa, Geobacter lovleyi
MLEVATWKSHKNLFLNTLAFTVCFAAWMFNGVLVTFLVDNQVFNWGPVKIGWLFGIPVLTGSLFRLPAGMLTDKFGGKPVYGTLLILCAIPMYLLSKADSFTSFALCSFGFGMAGVSFSIGIAFTSVWYPRERQGTALGIFGAGNAGAALTTLLAPTMLNRLTNNGANIERWRDLPVYYALILAAMGVIFFIFSDNKKPASSGKTFVQMLTPLKHMRVWRFGLYYFLVFGCFVAFSQWLVPYFVNVYYLPLVTAGLFASMFSLPSGVIRALGGWMSDKFGGRQIMYWVLGASTVISLMVMVPKMEIQSPGRGVMAKRAGVVQAVTDKTVVVKELKATSEVLGEQPYPLNAKPTVMENFDDRMLILPGKQTWQEPVVKVGQTVKKKELLAKGVTRIYFQANVWIFAGLVLVLGTIWGIGKAAVYKLIPDYFPEEVGVVGGMVGVLGGLGGFVCPIVFGYLLEWTGVWTSCWMFMFVLSVVCLVSLHYVVQKMMKDKHPGDMRVFENN

SEQ ID NO: 24 - protein, 422 aa, Thiobacillus denitrificans
MQSQQYKAWSVVSMSTLAFTVCFMIWMMFAVIGVPIKQQLGLNETQFGILVATPVLTGSLIRVPLGMWTDKFGGRIVFFVLMLTTVIPIWLISYATEFWQFLLVGLFVGLAGGSFTVGIAYCARWFPRERQGLAMGIFGAGNTGAAVTKLLAPIIVVGYGWTMVPKVYAGLMLVTAIVFWFFTYTEPAHKVSKSVTIREQLAAFKDPKVWRYSQYYSIVFGGYVALALWMTKYYVSQYGFDLKTAAFLAAAFSIPGGVLRAVGGYFSDKYGAHTITWWVLWVSLLCLFFLSYPQSSITIHTVDGLRTFHFGLGPTAFTIVMFSLGIAFAIGKASVFKYISDDYPDNIGVISGVVGLAGGLGGFLMPIMFGALVDLTGVRSSAFMLMFGVVWVSLMWMYFTEVREMDAAARGAKRVIAADVME

SEQ ID NO: 25 - protein, 427 aa, Cupriavidus metallidurans
MATPNLPSSKPEPVSSGAWTTLWSSTFAFTICFAVWMLFAVLGIPLKKELGLNDTEFGLLAATPVLSGSLIRVPLGIWTDRYGGRIVFFVLMLLTVIPIWLISYAHTLWQLLVLGLFVGLAGGSFSVGTPYVARWFPRSRQGLAMGIFGAGNSGAALTKFVAPALILAAGTWEIVPRVYSVAMLITAIVFWLFSRSNPAHRVSSATSWRAQLAVMRDPRVWRYSQYYSVVFGGYVGLSLWMTKYYIGEYGFDMKTAAFLAACFSLPGGVLRAIGGWISDRYGAHRTTWWVMWVSWVTFFLLSYPRSDFTIHTANGPESFHIALSPTVFTILMFVVGIAFAVGKASVFKFISNDFTHNIGAVSGVVGLAGGLGGFILPILFGALADLTGIRTSCFMLMYGAVCVSLVWMHYSQRAANARPTPETLQAA

SEQ ID NO: 26 - protein, 417 aa, Geobacter lovleyi
MASQTHKQLSVLTGSTLAFTVCFAVWVMFSIIGIPIKTNLNLNETEFGLLAATPILSGSLIRLPLGMWTDKYGGRIVFLVLMLCTVLPIYVIGDATRYWQFLVLGLFVGVAGGSFSVGISYVARWFSKARQGFAMGIFGAGNAGAAVTKFVAPSLVAAYGWQMVPKVYAVAMLATCGIFWLLTYSDPAHRVSSSVTMRDQLLALKDPRVWRYCQYYAMVFGGYVGLSLWMTKYYISEYGLSIQTAALVAAIFVLPSGVIRALGGWVSDKLGAHAVTNAILWISWVCLFLLSLPQGGFTVKTVQGPATFVVGLNVWVFTVLLFVVGIAWGFGKASVFKHIADEYPKNIGVISGIVGLMGGLGGFVLPIVFGALVDLTGIRSSAFMFLFAMTCLSLVLMFFSSSSRKGSHKLKIAEILE

SEQ ID NO: 27 - protein, 460 aa, Methylobacterium nodulans
MHETATPASRDQGRALWLSTLAFTICFAAWTIFSIIGVQIKKDLGLSDAQFGLLVGTPILTGSLIRLILGIWADQYGGRVVTVAVMLLAALATYLLTYAYDYPTFLLAALGVGLAGGVFSVGVAYVSKWFPKEKQGTALGIFGAGNIGAAVTKFLAPLVMVALGWKAVAQIWALGLVVMALVFYLGTKDDPDLAARRRVGLKPEPLSAMLAPLANLQVWRFSLYYFFVFGGFVALALWLPRYYTGVYGLDIVTAGWLAAAYSIPGSLFRVLGGSLSDRYGARKVMYWTFLGSCACTFLLSYPATHYVVSGIRGPISFDLALGPVAFTALTFGLGFFMSLGKAAVFKHIPVYYPDRVGAVGGVVGLIGGLGGFVLPIAFGFMNDLVGVWTSCFMLLFVVVAGSTAWMHAAVRAMEKRAHPELRQPKDLPELEALRAEVERLRALRGRPPVPASPLTGVPAE

SEQ ID NO: 28 - protein, 453 aa, Caulobacter sp.
MQTATPSQPGAGSALTMSTIAFTACFAVWTVFSIIGVKIKQDLGLSEAQFGLLVGTPILTGSLVRVFLGVWTDQYGGRLVNLLVMLSAAAATFLLSYAHTYPQFLVAALGVGLAGGSFAVGVAYVSKFFPKERQGAALGVFGAGNVGAAVTKFAAPFVMLALGWQSVAQIWAGVLAVLALAFFFTTRDEPDLQARRRTGAKPQNTAAQLAPLRKLQVWRFALYYFFVFGGFVALSLWLPHYLVAVYHLNIIAAGMLAAAYSIPGSLFRIVGGWLSDKIGARKVMYLTFGVSAVCAFLLSYPATSYVVDGVRGPIAFRLATGLVPFVILLFTLGFAMSLGKAAVFKHIPVYYPDHIGSVGGLVGMVGGLGGFVMPIAFGALNDLTGVWTSCFMLLFVLVAGALTWMHLAIGRMERANAPQLANLPQLPEMASLGTAAPTHAAPAGRAAIQPANS

SEQ ID NO: 29 - protein, 448 aa, Halomonas halodenitrificans
MQHLEGVTRPQQYRALGLSTLAFTTCFAVWTIFSIIGIQIKQDLGLNETQFGILVATPILTGSISRIFLGIWTEQFGGHRVFSVLMLLTAACVFLLSYVESYAMFLVAALGIGLAGGAFIVGIAYTSYWFEKDKQGTALGIFGAGNAGAAVTNFGAPFLLLALGWERTAVVYAVVLAAVAVGFWVFATEDPLTRARRRGQGAQATSARAQLEPLRHLRVWRFALYYFFVFGAFVALASYLPRYYVGAYGVSIAVAGSLAALYTLPASVFRALGGWMADRYGARAVMYLTFIASLVCLFLLAYPETRYVVQGKEGEIAFTLAMPLWGVVVLTVLLGFFMSLGKAAVFKHIPVYYPENVGSVGGLVGMIGGLGGFFLPILFGIVLDLTGIWTSSYMVIFMLVAVSLIWMHTAIRRMERKNVPELGEERYRYLPEIQEPAEEHARRHGPRP

SEQ ID NO: 30 - protein, 424 aa, Sinorhizobium meliloti
MSALHQTQSTYKGAPGRALWVSTGAFTVCFAIWTIFSIIGVRIKDELGLSEAEFGLLIGMPILTGSLVRIVLGIWTSRYGGRLVYTLTMLAAALATFLLAYATTYPQMLLAGLGVGLAGGSFAVGVAYVSPFFPPEKQGTALGIFGAGNVGAAVTKFLAPFVLVAFGWQAVAEVWAAALLVTAVVFWFSTEDDPQFRARRDVGAPRKSFLSEFEPLKNIQVWRFSLYYFFAFGGFVALALWLPRYLVGVYGFDIETAGMIAAAYSIPGSIFRAYGGALSDKLGARRIMYAMFAVSAVATAILSIPAGAAGGAMPILVTPIVFVVVTFVLGFVMSLGKAAVYKHIPVYYPSHVGAVGGIVGMMGGLGGFVLPIAFGFLKDVTGLWSSCFMLLFVIVAVSMVWMNVSIRQIKREADRGVPAGALAR

SEQ ID NO: 31 - protein, 402 aa, Paracoccus denitrificans
MPAVPPVPPSEASRALGLSTFAFTICFAVWTIFSIIGLQIREQLSLTETQFGLLIGLPILTGSLVRIGLGVLTDRLGGRLVYTMTMLSAAVATFLLSLATTWPQMLLAALGVGLAGGSFAVGVAYVSRFYAEGRQGTALGIFGTGNVGAAVTKFAAPFVMLALGWQATAQIWAAALVLTAVLFWLLSKDDPVTAAGAGRKAPLRAEFAPLGQVRVWRFSAYYFFSFGGFVALALWLPHYLTQVYGFGVGTAGMIGAAYSIPGSIFRAYGGVLSDRIGARAVMYATFIVSLAATAILSIPAGVPVPVFLAVIFVLGFFMSLGKAAVYKHIPSYYPGHVGAVGGLVGMIGGLGGFALPLLFGWLRDQTGLWSSCFMALFLLVGLCALWMHASIRQMGRAPLQAA

SEQ ID NO: 32 - protein, 427 aa, Halomonas halodenitrificans
MPHLPDRRDPVVVGYRPLVVVLLSPLVFALVFASWTIFAVLGLELREPLGLDELGFAFMLATPMLTGALAALPMAALARRHGGRRVMIACLLLICPFLWAIARSSSYSHFLLSGAGLGLGAGSLAAGLVYVGELSPRRHVGLALGLYGAGMMGAGLSYLLLPLVSQAYGWRSAPLLYLLPVLTVATLLWLFADDPDLSVDSGLAGVAAGTRPRLSGWLRALRHWRPWRLAVVYSFFYGAFVALSLWLPAYLEAQYDLGIRYAALLALPFPLAVGLGQVAGGVWGDVHDFRALRWWVSAWVLVCLFLLSYPPFDMRVEGVEGMLMLRYSAPLWGFLTLLVAMGLVMGVGQGSLMRMIHRDHGQQLALVGGLALTLGGLFGALLPVMFALGNHWVGIRTAGFMFLYASLVLCMLVMVWDHASQAGQTRP

SEQ ID NO: 33 - protein, 400 aa, Lactobacillus fermentum
MIMETTQQDVAHGSRLNAYTALILATLAMIVCFMSWSNFAPLAAQVGTMFHLSVASRTLLLATPVLLGSIARIPVGILSDKYGGKKVYIILMIFILIPLFMIPRVHSFGMLLFAALLVGMAGTSFAVGVSYASVWFPKEQQGLALGIVSMGNMGNAVAALTLPYISKSHGFTAVYNFLMILTVVIGVIFAIFCKEMPTNPNKTMGEALSVAKESSTWYLSLFYFLTFGLFVAFTNLTPLFLTGMFNYSQVTAGLYAALFAGVCTIIRPVGGFMADKMRPMMLLQWVFVAIIAFAILIMVSFKSQPLFIAGIVLVGLAAGVGNGVVFKMVPYVSQGNTGAVTGFVGAMGGLGGFFPPLVIGWIKEWTGSYELGIGLLVLTGVICLFALWHHFIRGDARIVK

SEQ ID NO: 34 - protein, 502 aa, Bacillus clausii
MINKLQLPLQTMNLVLGFMVWVIISALLPFIQEDIAIPADRVAILTAIPVVLGSVLRIPLGYYANVVGARMVFITSFILLLFPVYFISIATSFTHLVVGGLFLGIGGAVFSVGVTSLPKYHLKEKLGLVNGIYGMGNLGTAITTFAAPVIATQIGWSATVQLYLILLLVFVALNAVFGDRKETKVKTPIMEQVKGVYKNDKLWYFSLFYFITFGSFVAFTVYLPNFLVSHFELPKVDAGLRTAGFILIATFLRPVGGWLADKFKPLFLLMGVFIGMTLAAVVLAFSPSLALYTVGCLTIAVCAGLGNGIIFKLVPFYFNKQAGIVNGIVSMMGGLGGFFPPLMLSFIHSVTGQYSIGFMALSQVALASFVLVVWMYYQDKLTVASQVFNSTGQGILVTDAKKRIHAVNPAFTRLTGYEEEEVLGRNPNLLKSGRQSSAFYQIMWTEIMEKGSWQGEIWNRRKNGEEYLELLTINAVKDETGDIVHYVGTFSDITDHPPRKHA

SEQ ID NO: 35 - protein, 484 aa, Bacillus thuringiensis
MVGFMVWVLISSLMPNIKKNITLSDNEVALVTAVPVILGSLMRILLGYWTNRFGARINFVISFLILLFPVFYISISDSLVDLVIGGLVLGIGGATFSIGVTSLPKYYPKERHGFINGIYGAGNIGTAITSFAAPLLANSIGWVSTVRLFLIPLLIFAILNFFLGDSKEPRENTPLGKQIKAVYRNEKLWFLSFFYFITFGSFVAFTVYLPNFLVSNFQLTPVDAGIRTAIFITIATFLRPIGGWLGDKFNPLLILLFVFGGLTFSGVLLSFSPTITLYTIGCLTVAFCAGIGNGAIFKLVPYYFSKQAGIVNGIVSAMGGIGGFFPPLILSLVFNITGHYAIGFMALAQFSLVSFVIIVWMYYLEKLSLETKIIESVAQGMMVTDTKGIIKKINPAFTRVTGYQSKEVIGKTPNILRSGLHNANFYHKMWESIRVNGYWQGEIMNKRKNNEIYSEWLTISAVKNEVQEVKYYVGLFSDLTEEKK

SEQ ID NO: 36 - protein, 433 aa, Burkholderia phymatum
MTVKATSIDLLNWRTPPMRAFHFAWMAFFVCFFAWFACAPLMPLIKQEFHLTADQVANINIAAVAITILVRLIVGPMCDRFGPRKVYVALMVLGALPVLGAALAHNYTAFLLCRLGIGAVGASFVITQYHTSVMFAGNVVGTANATSAGWGNAGAGAAQMFVPLMLAGIVALGASNADAWRLTLVLPGLAMPLMAALYWRFTQDCPQGNFNELRVRGIVVDSGKKGSWASLLAASRNYRVWMLFVTYAACFGVEVFIHNVAAIYYVDHFQLSLREAGLAAGSFGLLAIFARPLGGLLSDWGAKRRGLSARSMLLFMLIAGEGAGLLLFSQASHAAFAVAAMLLFGLFTHMACGATYALVPFIDRKALGGVAGIVGAGGNVGAVAAGFLAKGMGDLHQTLMMLGGLVTASAICAVAVRFSAEHTAREAALGATN

SEQ ID NO: 37 - protein, 437 aa, Ralstonia metallidurans
MNGKATRIDLLSFKTPQMRAFHLTWMAFFVCFFAWFACAPLMPVLKGEFGLTPNQIANINIAAVAVTILVRLVIGPLCDRFGPRKTYTGLLAIGALPVLGVAFAQNYETFLFFRLLIGAVGASFVITQYHTSVMFAPNVVGTANAASAGWGNAGGGAAQGLMPLLLATILFLGVDHTMGWRVALLVPGILMLVMAVVYWRFTQDCPEGNFSELRARGIAVSGGKGGGGWASFRAASANYRVWMLFITYGACFGVEIFIHNVAATFYVDRFGLSLSAAGMAAASFGLLALFARALGGYVSDKLAMRRGLDARSLILFVFILGEGLGLLGFAHASTATTAVAAMLVFGLFTHMACGATYALVPFIDRKALGGVAGIIGAGGNVGAVAAGFLMKGLGDLQQTLTWLGVAATLAALCAIAVRFSAEHKAQEQALYDSALAN

SEQ ID NO: 38 - protein, 458 aa, Planctomyces limnophilus
MTTSAKATSIRLWDFKTPPMRAFHMSWFAFFLCFFAWFGIAPLMPVVRDEMHLSKDQVGWCIIGSVAITVLARLYVGWLCDRIGPRLAYSGLLVLASIPVMGIGLAHDFTTFLMFRIAIGAIGASFVITQYHTSIMFAKNCVGTANATTAGWGNLGGGVTQMVMPTLFALLMVAFGLSTASSWRFCMLLAGVVCAITGIAYFFLTQDTPEGNFAELRATGKMSQKSAVKGTFQEACRDYRVWILFLVYGACFGMELTLDNIAALYFIDYFEELKTADPVYALGIAGFVAGLFGSMNLFARALGGIASDRCAAKWALSGRVRCLFIVVLLEGMALMLFSQARTLQFAIPAMLLLGLFVKMSNGATYAVVPFINKRALGSVSGIVGAGGNAAAVAAGFLFKSSVVSWPTALFILGVIVTLVSVSILAIRFAPQIESEEATLPILTGDEAAPVLPAGVQAV

SEQ ID NO: 39 - protein, 436 aa, Dyadobacter fermentans
METTNKPLEKLNIFSFKGVQMRTFHLTWMAFFLCFFGWFGLAPLMTVIKADLGLTKPQIGNIIIASVAATVIARIAIGKLCDSWGPRKTYTALLGFGAIPVMTVGLVDSYEGFLLFRLAIGVIGASFVVTQYHTSVMFDKKIVGTANAVAGGWGNLGGGITNMVMPLVFAAFVGAGYLPESAWRIAMVIPGVALLIFAFVYYFFTKDTPAGNFEDLAITNPKAAKTKGTLGIAMRDPRTWALFLAYGACFGIEITFDNVAALYFFDNFNTSLETAGILAGAFGFMNIFARAIGGIVADKVGNKWGMLGKGRLLALLLVLEGIGIALFAQSGSIVGAVITMLCFAMFLKMANGATYAIVPFINQKAIGSVSGIVGAGGNVGAVLAGFLFKSSAISYSEAFMYIGVAIACIAAIVALINFEKEQTVTAETGQLEPVEA

SEQ ID NO: 40 - protein, 539 aa, Synechococcus sp.
MIGELFTKATQGRYKILHLTWFAFFLSFVVWFNFPPFATTIVQEFGLTPAQAGTIGLCNVALTVPARIIIGMLLDRFGPRVTYSCLLIYAAIPCLIFATATSFNQLVVGRLLMGIVGAGFVIGIRMTAEWFPPKEVGTAEGIYGGWGNFGSAFSAFTMVLFAMALSFLPGSFNFGEPQPFVVLGMRFSSEVLNWRAAIAGSGIVAALYGIFYYFNVTDTPPGKVYKRPKSARGMEVTTVRDFWFLMAMNIPLTAILMVLAWRLTKVNFLSIPAMYIVWLCLLGLYAFQAYNCWSVNKDLLAGRKRYPAEDRYRFKQVALLELTYIVNFGSELAVVSILPAFFEGTFGLDKATAGIIAASYAFMNLVSRPGGGIISDSVGSRKWTMTVLLAGMGVGYLIFSMVGSGWSLTLAVLLVMACSFFVQAAEGATFALVPLVKPRITGQIAGNVGAYGNVGAVAYLTTLLLLKEAFVPAGDQIDPALIAAGTARANAAFFQVLGVAGLVVAFLCAFFLDEPKNSFADAHEGEEETVVAPSSSMLS

SEQ ID NO: 41 - protein, 513 aa, Synechococcus sp.
MLRDLWSFQGRYRTLHLTWFAFFLTFVVWFNLAPLATTVKADLGLTLGQIRTVAICNVALTIPARVLIGMLLDKYGPRLTYSGILVFSAIPCLLFASAQDFNQLVVARLLLSIVGAGFVIGIRMVAEWFPPKEIGLAEGIYGGWGNFGSAFSALTMVALAGFLSFSGGFELPTGAVLNWRGAIAITGIISAAYGIFYFFNVTDTPPGKTYQRPSRTAGLEVTSMRDFWGLLGMNVPFAAILCVLCWRLQKVGFLNAGTYPLAIGAVAVWFAFQTWGIIRTNRELILGTKVYPKEDRYEFRQVAILELTYIVNFGSELAVVSMLPTFFETTFDLPKATAGILASCFAFVNLVARPAGGLISDKVGSRKNTMGFLTAGLGVGYLVMSMIKPGTFTGTTGIVIAVAITMLASFFVQSGEGATFALVPLVKRRITGQVAGLVGAYGNVGAVTYLTIFSLLPMWMGGGGEPTPEVIAASNSAFFQILGVAGLIVAFFCFFFLKEPKGSFDELHEGEVA

SEQ ID NO: 42 - protein, 500 aa, Nostoc punctiforme
MLKKLFSFSDRYRILHQTWFAFFLTFVCWFNFAPFATTIGKELHLAPEQIKTLGICNLALTIPARLIIGMLLDRFGPRITYSILLMFAVVPCLATALAQDFNQLVISRLLMGIVGSGFVVGIRMVAEWFQPKEMGIAQGIYGGWGNFGAFGAEFALPILAISTSFFSGGASNWRLAIALVGIITAIYGVIYYNTVQDTPRGKVYKKPKKNGSLEVTSIKSFWAMMISNFGLIFALGLLAWRLEQKKIHFLTLSQMYLTWLVLAGLFAYQSYKAWQVNRELLTGKKTYPVSERFQFGQVALLEFTYITNFGSELAAVSMLPAFFEKTFGLEHVVAGMIAATYPFLNLVSRPSGGLISDKFGSRKWTMTIISVGIGVSYLMAHFINSNWPIPVAIAVTMFAAYFAQAGCGATYSIVPMIKKEATGQIAGNVGAYGNFGGVVYLTIFSLTDAPTLFSTMGIAALICAFMCAFFLKEPKGSFAPAYEGEASETATKSSVFLTEE

SEQ ID NO: 43 - protein, 501 aa, Synechococcus sp.
MFRRLLSFSGRYRILHLTWFAFLLSFVVIFNAAPLAESIIEEFQLTELQFRTMLLCNLALAIPFRVIFGMLIDRIGPRIVFSGVLIYSAIPCIAFAFAQDYNQLLWSRLAIGVVAAGFVVGIRMVANWFPPAEIGFAEGIYGGWGNFGSGVAAIALPLVATGASFFVGGQSSWRYTVALSGIVAAAYGVFYFFNVQDTPPDKEFKSAKHPGAIEVTSQKDFWLMTMSNFPLYVALGVVAWRFNVVEALSATAVVIICVALFGLYLFQTYWNWKVNRQLMAGQKHYAPEERYDFTQVVLLNLTYFVCFGSELAVVSMIPLFYLTTFSLPVAVAGAVASSYAFMNLVARPGGGLISDTIGSRKWTLVILQAVTGVGYLTMGLINVGWLLPLAIGVTMFASFSVQAAEGATYAIVPLVKEEITGQIAGSVGAWGNVGGVAFLLLFSLLPTGDVGNKIFFSTMGISSLIMFFLLWFFLKEPTGTHGEEALELQPSAVSGKLTNRQ

SEQ ID NO: 44 - protein, 548 aa, Roseobacter denitrificans
MKISTLFRVQDRAIRALHLTWIAFFITFYVWFNMAPLASSMLAANDWLTKDDIKLFAIANVALTIPARILVGLALDKYGPRRVFSILMVVMAVPTLFFAFGDTKMQLFVSRLIMSSVGAGFVVGIHMTALWFKPRDIGFAEGFYAGWGNFGSAAAALTIPTIALNMFGGDDGWRYAIAMSGIIMAAYGVFYWFAITDGPNPDTHKKAKGSALEVSTYKDLVLLVIFTVPLIGILSILIYRVQMMGYIDGFVATICYASIATLVVYQVWQVLRTNLPILRKGVPEDDKYPFSSVAALNTTYFANFGAELAVVSMLPMFFQETWGLTAVVAGLIAASFAFINLVARPMGGLVSDRMGNRRFVMLAYMLGIAIGFALMGLLNSEWPLIIAIAITIACSFFVQGAEGATFGIIPSIKRRVTGQIAGMAGAYGNVGAVFYLFIFTFVDTQTFFFIIACGALISWVVCFFWLKEPEGGFGEEYVLSSVDQAIAAEATRKKEAEAELALIFEGSEKVALAEKGNGLTVTARFKDLDDLKTALARLGPNGSQQPAE

SEQ ID NO: 45 - protein, 504 aa, Bacillus cellulosilyticus
MKIADIFKFKNEQMKVLHLTWIAFFISFFTWFNMAPLATTMLESSDWLTSEHIAALAIINVALTIPARIVIGMLIDRFGPRVVYSGLLILMSIPTFMFAFGDSWTQLMISRLLLSSIGASFVIGIRMVSEWFPPKDVGFAEGVYGGWGNFGSAAGAMLLPWFALTAFGGDEGWRYAVALTGVFCIVYGIIYFLAVRDTPEGKAFVVPKKNGAMEVSTWKDMIQLILWTLPLGGALAVLAWRLEGMGFISSTVLYSTYAIIGAVMLYQIYKILQVNVPILKKGVPKDDQYKFKNVAALNSTYFANFGAELAIVSMLPMFFQMTFSLSATSAGLIAASFAFINLIARPLGGILSDRMGNRKRVMLIYMVGITLGMVGMGFINSGWPLVLAVAITVLTSVFVQGSEGATFAIIPMIKKRITGQVAGMAGAYGNVGSTIYLTLYTFVTPQQFFFILAGGAFTSFVLCYFWLEEPKNSFANEYYESSVDRENAVEDHYEMELKKVAVNK

SEQ ID NO: 46 - protein, 491 aa, Shewanella woodyi
MSNEGKMNLLNFADPKIKMLHVTWFAFFLSFVVWFSHAPLMVFIKEAFDLTSAQVKALLILNVALTIPARIVIGILVDKYGPRIIYSSLLIISSFICLGFAMAQSFEQLALFRFLLGFVGAGFVIGIRLVGEWFPAKQVGIAEGIYGGWGNFGSAAAAMSLPTLAYAFGGDDGWRYALACTGILAGLYGIFFYIAARNTPKGSTYFKPKKSGGLEVTSWKDFYFYLFMNIPMYIALAVLAWKLSPTGVNLFTTETMYIMWLSLLVLFFIQVNSIWRVNKENLTHGVPNIEKYEFKQVAILDVAYFVTFGSELAVVSMLPLFFLETFDGLDPVKAGLLASGFAFMNLVARPTGGWFSDKFGRRKSLMILVGGLAAGYAILSQVDGSWFIPLAVMATMVCSFFVQAGEGAVFAIVPLVKRRMTGQIAGMAGAYGNVGAVTYLTVLSFVDYSTFFLVISGSALFIFIATMFLNEPKGHMAEVNEDGTVELIDVN

SEQ ID NO: 47 - protein, 489 aa, Alcanivorax sp.
MSADKLNLLNFSAPRIRLLHLSWLAFFITFVVWFSHAPLMGHLREAFDLSAEQIKALLILNVALTIPARVVIGSLVDRFGPRRVFGLLLILAAFPCWAFALSTTFEQLAVTRLLMGFVGAGFVVGIRLISEWFPAREVGLAEGIYGGWGNFGSAAAAITLPTVALLFGGDNGWRLAIASTGALAMAYGVFFLWRARNTPAGASYFKPKKASALEVSSRKDLFFYLLMSLPLYIALLVIVWRLGPSNLDLFGTTTQIMLAALIVSLAVVQLGQAWRVNHERLKTGVEEHDRYSFKQVAILDLAYMVTFGSELAVVSMLPLFFTDTFSLSAVTAGLLASGYAFMNLVARPGGGWVSDKFGRKKSLAIMLCGLMVGYGMMSQIAGSWPIALAVIATMCCSFFVQAGEGAVFATVPLIKRRLTGQIAGMVGAYGNAGAVIFLTVLTFVDPSTFFLVIAASAAVSLAAVQFLDEPKGHIAEIDDDGNVQLIEVG

SEQ ID NO: 48 - protein, 467 aa, Alcanivorax sp.
MAFFISFALWFSHAPLMGHLRDVFDLTGEQVKALLILNVALTIPARVVIGSLVDQFGPRRVFSTLLMSAALPCWAFALSNSFEQLAISRLLLGFVGASFVVGIRLISEWFPAREVGLAEGIYAGWGNFGAFASYVTLPTLALFFGGEDGWRWAVASTGFISFLYGLFFMWRARNTPAGASYFKPKKASALEVSNRRDLFFYIGASLPLYIALYIIVWRLGPAGFRLYDNSTQAIFIVAVSLLAAIQLSQIWQVNRERWQQSAPEQDSYPFKQVAILNLSYFITFGSELAVNSMLPLFFLDTFSEVTPVTAGLLASAFAFTNLVARPGGGWLSDRIGRKKSLTILFCGLLMGFVLLSQINSGWPVLLAMAATMVCSCFIQGGGGAIFATVPLIKRRLTGQISGMVGAYGNAGAVVFLTALTFVDASTFFLVIAACATAVLVAVQFLDEPKGHIAEVDEDGRVQLIEVS

SEQ ID NO: 49 - protein, 491 aa, Shewanella denitrificans
MSLESRFNLFSFSGKMKVLHLSWMAFFITFAVWFNFAPMLQSVKESLGLTSEQIKTLLILNVAFTIPARVVVGMLTDRFGPRLVYSALLAICALPCFAFALADTFVQAAIARFLLGFIGAGFVVGIRLVSEWFPHNELGTAEGIYGGWGNFGSAAAAFCLPALALAFGGDDGWRYATGITGLMSLGFALVFYFNVEDTPKGATYFKPKSLKAMEVTSKGDFLLLLVMKLPLYGALALLAWKLSPTGVAMLSDTAVISVYLGLALLYCYEVLQVWQVNKIIFTEPVAAIHQYKFKQVAVLNVLYFATFGSELAVVSMLPLFFAETFELTPVVAGMVASAYAFMNLMSRPGGGWISDKFGRKPTLLILTAGLAAGYFLMGQVNSDWPLWVAVAAAMACSFFVQSGEGAVFATVPLIKRRMTGQIAGMTGAYGNVGAVCYLTVLSFVDYSSFFYVIAATAVLGFCVLWFMEEPQGQMAEVNHDGSVTLIDVSSR

SEQ ID NO: 50 - protein, 488 aa, Shewanella woodyi
MKAEKFNLFSFSGKMKMMHMSWMAFFISFVVWFNAAPLMSVIADSLGLSKEQIKTLLILNVALTIPARIIIGMVTDKFGPRLTYSALLIVCSIPCFMFALGTSFEQLALARFLLGFIGAGFVIGIRMVSEWFPANELGTAEGIYGGWGNFGSAAAAFTLPAIALVFGGEDGWRYAIGATGGLSLLFGVIYFLNVSDTPKGSTYFKPKKAGALEVTSKADLVLLVVMKLPMYATLALLAWKLSPEGVKMFSQSSTELIYGLLILVLAIDLYLTYQVNKHLFDGPVPEFERYPFKQVAVLNVLYFSTFGSELAVVSMLPLFFAETFELGLAQAGMLASSYAFMNLLSRPGGGWISDRFGRKPTLMILTAGLALGYLGMAQINDQWSLPLAVLMVMTCSFFVQGGEGAVFAAVPLIKRRLTGQIAGMTGAYGNVGAVFFLTVYSMVSTQLFFYVIGASALFGLVSLLFLTEPKGHMTEVNEDGEVTMISVN

SEQ ID NO: 51 - protein, 462 aa, Escherichia coli
MALQNEKNSRYLLRDWKPENPAFWENKGKHIARRNLWISVSCLLLAFCVWMLFSAVTVNLNKIGFNFTTDQLFLLTALPSVSGALLRVPYSFMVPIFGGRRWTVFSTAILIIPCVWLGIAVQNPNTPFGIFIVIALLCGFAGANFASSMGNISFFFPKAKQGSALGINGGLGNLGVSVMQLVAPLVIFVPVFAFLGVNGVPQADGSVMSLANAAWIWVPLLAIATIAAWSGMNDIASSRASIADQLPVLQRLHLWLLSLLYLATFGSFIGFSAGFAMLAKTQFPDVNILRLAFFGPFIGAIARSVGGAISDKFGGVRVTLINFIFMAIFSALLFLTLPGTGSGNFIAFYAVFMGLFLTAGLGSGSTFQMIAVIFRQITIYRVKMKGGSDEQAHKEAVTETAAALGFISAIGAVGGFFIPQAFGMSLNMTGSPVGAMKVFLIFYIVCVLLTWLVYGRRKFSQK

SEQ ID NO: 52 - protein, 502 aa, Escherichia coli
MTFAAHNAMSIAPFKLFSLHGKTKILHLNWLAFFISFVIWFNHAPLLMLIQQDLQISDADIEIILLLNVALAIPARVVTGLLVDRFGARISYSVLLAVCSLPCFMFAMADDFAELAWSRFLLGFIGASFVVGVRIIGDWFPSSQMGFAEGIYAGWGNFGSAAAAIALPGLALYLGEENGWRYAVAVTGCLALLFSLVYYRNVENLPPELAGLQVRHANSMEVASVQDLFLYMLSLLPLYISLSLLTWKLSALPEPLLSTAWAFALHAGIWLLFFWHAHKLVGTNAARLSQPVPEIHQYRYKQVFILALCYLMTFGSKLAVLSMLPMFFFNTFKDSHQIGMLDAGLLASSFVITNIIARPAGGWLSDRIGRRLSILLFTAGLALGYLLMAQISTDWPISWAVLVTLFCAVFMQAAEGAIFAFVPLIRRAITGEVAGIVGAYGNAGAIIFLIALTFLTPTSFFLVLGAGCLLSLGLIMRLEEPGNFMNQILPDGTIIKIELESE

SEQ ID NO: 53 - DNA, 1383 bp, Cupriavidus metallidurans
atgtcaagttccatactgacccgctgggagcccgagaacgtggccttctggcgcgaccagggcgagcgaatcgcctatcgcaacctctggatttcgatccccgcgctgatgctggcgttcgtgatctggatgctctggagcgtggtggcggtcaacctcgaccgcgccggctttcagttcaccaagaaccagctcttctggctgaccgcgctgcccgcgctgtccggtgccacactgcgtatcttctactcgttcctggtgccgatctttggcggccgccgcttcacggccatctccacggcgctgctgctgattccggcggtgggcatgggcttcgcgctacgcgacccgtcgaccagctaccccacgctgctgatcttggcgctgctgtgcggcctgggcggcgcgaacttcagttcgtcgatggccaacatcagcttcttcttcccgaaagaaaagaagggcctggccactggcctgaacgccggtatcggcaacctgggcgtctccgtggtgcagttcgtcacgccactggtggtttcggtggccgtgttcggcgcgctcggcggtgaaccgcagacctacaaggcggccgacgccacgcaacaactctggctgcagaacgccggtttcatctgggtgccgtttatcatcgtcgcctcgctggcggcatggttcggcatgcacgacatcgccgacgcgcgcgcatcgttcgccgaacaggccgtgatcttcacacgcaagcacaactggctgatgtgctggctctatatcggcacgttcggctcgttcatcggcttctcggccggcctggcgctgctgaccaagtcgcagttccccggcgtcaacccgacggcctacgccttcctcggaccgctcgttggcgcactgacccgcccggttggtggctggatctcggacagactcggcggtgcccgcgtcacgctctggaccttcatcggcatgatcctcgcggtcttcgccgtgctggccgccctgcccgccgatggcggcgcgggcagcttccccgccttcctcggcgccttcatcgtgctgttcgccctgaccggcatcggcaacggctcgacgttccgcatgatccccgtgatcttcctgacagagcgccagcgcgcggccggcaaggacgccgcctcgcagcggcaggccgtgcaggacgccggcaaggaatcggccgccgtgctcggcttctcgggtgcgatcggcgcctacggcggcttcttcatccccaagagcttcggcacctcgctggacctgactggttcgcccctcgccgcgctctactgcttcatcgtcttctacgtgacctgtgtgctcgtgacgtggtggttctacgcccgccgcaacgccgcaatgccgtgctga

SEQ ID NO: 54 - DNA, 1374 bp, Geobacter lovleyi
atggcacgtgtattaacgacatggaatccggaagacaaggaattctgggaaagcgaagggaaagccattgccaatcgcaacctctggatttccataccggcactgctgctggccttctcggtctggatggtctggtcgatggtggtcgtaaaactgccactgatcggtttccagttcgacaccaaccagcttttctggctggcagcggtaccggcgctctccggagctaccctgcgcattttttattcattcatggtgccgatctttggtggtcgccgctggacggctatttcaacggcttctttgctcatccctgccgttggtatcggttttgccgttcgggatcacaccaccagctacacaaccttgctctctttggcacttctgtgcggtttcggtggtggcaacttttcttcaagcatggccaatatcagcttcttttttccgaaagctcagaaagggactgcattggggctgaatgcgggacttggcaatcttggagtatcggccatgcagtttcttgtccctttggccatcaccgctggtgtgttagggcctgtttgtggcgacccgcaagtctgcgtcgtcaatggtgcgactaagcagctttggcttcagaatgccggattcatttgggtgccgttcatcatcatagccacgattgctgcctggttcggcatgaacgacattgccgacgccaaggcttcattcagagagcaggcagtgatattcaaacgtaaacataactggttgatgtgctggctctacctggggacctttggttcattcataggtttttctgccgggtttgctcttcttaccaagaagctttttccggagatagatccgacgcaatacgctttccttggtccgctggttggcgccattgcccgtcccatcggtggctggatctccgataagctcggcggtgctcgcgtcacattatggacctttgccgctatggtgtttgcggtgttcggtgtactggcatttctcccccacaacggacaggggggaagcttcttcggctttctgatcatgttcctgattctgtttaccctgaccggaatcggaaacgcctcgaccttccgcatgattccgataatctacatcacggagcaccagcgtaatgccagagggcgcagcgaggtgcagatcaacatggacgctgcaaaggaagctgctgctgctctcggatttgccggtgcattgggcgcgtatggcggattcttcatacctaaaagctttggtacctccatcgccatgaccggaggaccggaggcggcactctacggtttcattatcttctatatgttgtgcatcgtcatgacctggtggttctattcacgcagcaatgccgaaatgccatgttaa

SEQ ID NO: 55 - DNA, 1374 bp, Geobacter lovleyi
atggcacgcatacttagcacgtggacacctgaagacaagcagttctgggaacaggaaggcaaggcagttgcctcccggaacctctggatatcgataccggctctgctgttggccttcgccgtctggatggtctggtcgatggtggtggtgaagctgccggacatcggcttcagctatacgccgaaccagttgttctggctggcggccctgccggcgctctccggcgctaccctgcgtatcttctactccttcatggtgccgatcttcggcggacggcgctggaccgccatcagcaccgcctcgctgctgctgccagccatcggcatcggttttgcggtgcagaatccaggtaccagctacagcaccatggtaatcctggcactgctgtgcggcttcggcggcggcaacttctcctccagcatgtccaatatcagcttcttctaccccaaggcccagaagggcaccgcactggggatgaacgccgggctgggcaacctgggggtcagcaccatgcagtttctggtgccggtggtaatcaccttcggcctgttcggctcgttgggcggagaaccgcagttgtgggtcaaaggggtagtcaccaagcagctctggctgcagaacgccggctttgtctgggtgccgttcatcgtgattgccaccatcgcagcctggttcggcatgaatgatatcgcctcggccaaggcatccttcagcgaacaggcggtgatcttcaggcgcaagcataactggctgatgtgctggctctacctggggaccttcggctccttcatcggtttttcagccggctttgccctgcttaccaaaaagatgttcccggctatcgaccccacccagtacgcctttctgggaccgctcgtgggcgcgattgcccggccgatcggcggctggatcgcggacaaactgggcggcgccagggtcaccttctggaccttcatcggcatggtgctggcggtcttcggcgtgctggcctccatgccaacagccgcgagcgccggcagctttatcatgttcatggttatgttcatgctgcttttcaccctgaccggcgttggcaatgcctctaccttccggatgatcccgataatctacctgaccgagcatcaacgtgccgcgaccggtcgtgatgaggcccaggttaatgtcgacgctgccaaggaagcggctgcggcgctcggttttgcaggagcattgggggcctatggcggtttcttcatccccaagagtttcggtacatcgctggccatgaccggcagccccaacgccgcactgtacggtttcatcatcttttatgtcagttgtattatcatgacctggtggtattacagccgcaagaacgccccgatgccctgttaa

SEQ ID NO: 56 - DNA, 1410 bp, Burkholderia phymatum
atgactacccggcccctgttatctcatcgaggccagaccatccacatctgggcgcccgaagacaaggccttttggcagcgcgaaggcgaagcgattgcgcgactcaatctgtggatctcggtgcctgcgctattcctcgcatttgcgatctggcaggtctggagcgtggtggcagtcagcctgccgtcgctcggcttccgatattcaaccaatcaactgttctggctagcggcggctcccgcgctaagcggcgcgacactgcgcatcttctattcgttcatggttccgctcgtgggcggccgccgctggaccgctctctcgaccgcgtcactgctgattccagcgatcggtatcggcttcgccgtgcaagacaatacgacgagctatcccaccatgctcacgcttgcgttgctgtgcggtttcggcggcggcaacttcagttccagcatggccaacatcagtttcttttttcccaaagaacgcaaagggtccgcgctcggcgtgaacgcgggtcttggcaaccttggtgtatcagtcgtgcagttcctgagcccactcgtcgtcaccgcaggggtatttggcatcttcgcgggtgcgccacagacggtcggcaagggctcgcagatcgtccacgtgtggacgcaaaatgccgcgttcatctgggtgccctggattgctctggcagcgttggccgcgtggttcggcatgaacgatctcgccgaggcgaaagcgtcgttcgcggatcaggccgtgatcttccgccgccgccacaactggctgatgtgcatcctttacctgggaaccttcggttcgttcatcggctatgcagcgggttttccgctactgatcaagagccagtttccgacgctcgatgcgcttgcctacgcatgggtcggccccttcgtcggcgcggcggtccgcccgttcggcggctggcttgcggacaagctgggcggcgcgcgcgtcacgctatggaatttcgtcgtgatggcgggtgcggtggcctgcgtgctcgtttttctaccgtccggaccgtcacacggcagtttcgcaggcttctttgcaagctttctcgttctcttcctcacgacgggcatcggcaatggttcgacctttcgaatgatcccggtgatcttcctgaacaccagactgcaagaggtcgccccgtccgacaaggaagccgtgcagcgcgccacaagggagggcaacaccgaggccgccgccgcgctcggcttcgccgccgcgatgggcgcatacggcggcttcttcattcccaagagctacggcacctcgatctcgctcacgggcggccccgaagccgcgctctacgttttcatcgccttctacatcgtatgcatcgcactgacctggtggcactacgcccgtcgtcacgccgcgatgccctgctga

SEQ ID NO: 57 - DNA, 1401 bp, Roseobacter denitrificans
atggcgattacagacacctcaaatggcagcagccgtcacgtgttgacggactggcgccccgaagacccccagttctgggaggaaaagggcaaggccatcgcaacccgcaacctttggatctcgatcccgaacctgctcatggccttctcggtctggatggtttggtcggtcgttgtggccaagatgcctgccattggctttgatttctcggtttcagagcgtttctggctggcggctttgcccggcctgtcgggcgcaacactgcggattttctacagcttcgttatcccggtctttggcggccgtcggtggacggccatctcgaccgcttcgcttttgctgcccgcactcggtatcggcttcgcggtacagaaccccgaaacgtcatacttcacattcctgatccttgccctgatgtgcggcttcggcggcggcaacttcgcctcttcgatggccaacatcgcctatttctatcccaagaaagtcaaaggccaggcgctggcaatgaatgcgggcctgggcaaccttggcgtctccgtgatgcagtttctcgtgcctgtcgtcatcaccatgggtgttttcggcgccgtgggtggtgagccgcaaaccctgtccgatggcggtcaactcttcattcagaatgctggcttcatctgggtgccgttcctggccattggtgccatcgccgcgtggttcggcatgaatgacatcgctgacgcaaaggcctctgtgggcgagcagatgtccatcctgggccgctaccacaactgggtgatgtgtgtgctttatgttggcacattcggctccttcattggctatgctgcgggtttcccgcttctgatgaagacacagtttccagaagttgatgtgctgaaatacgccttcctcggcccgcttgtgggagcgctgagccgctctgccacgggctggatttccgacaagttcggcggtgggaaagtgactttctgggtgttcctcggcatgatcgttgcggtttacggcgtgatcaccttcttgccatcgacacctgaagcggctgacggcagtttctggggcttctttgcctgcttcatggcgctcttcttcctgaccggtgtgggcaatgcctccaccttccagatgatcccgtcgatcatgaaacaggaaatcccgcgtctcatgccgaacctcgaggccaccaacatgcagcgcaccatcgagcgcgagtctgctgccatcattgcctttacgtcggccatcgcagcttacggcgccttcttcatcccgaagagctacggcacctcgatcgccataaccggcagtccgcacggcgcgctctgggcctttctcgggttctatgcggtctgcaccgtaatcacctgggtctactacagccgcaagaacgcacctgttccctgctga

SEQ ID NO: 58 - DNA, 1434 bp, Caulobacter sp.
atgagtaggccgcaatccatgtcgacttccaaatctggtccggtgctcaccgactggcgtcccgaggacgccacgttctggagcgagaccggcaagcgcgtcgccacccgcaacctgtggatctcggtgcccaacctgctgctggccttctcggtctggatggtgtggtcgatggtcatcgccaagctcaagctggtgggcttcaagttcaccaccgagcagctgttctggctggccgccctgcccgccctgtcgggcgccaccctgcgggtgttctacagcttcatggtgccgatcgtcggcggccggcgctggaccgccctggccaccctgtcgctgctgatcccggccatcggcatcggaatcgtcgtgcagcacccggagacgccctacggcgtcttcgttctcctggccctggcttgcggcctgggcggcggcaacttcgcctcctccatggccaatatctcgttcttcttcccgaggagcgaaaagggcgcggcgctcggcgtcaacgccggcttcggcaatctcggcgtcagcgtcatgcagttcctggtgccggtggtgatcggtctggcgctgtttggccccctggttggcgcgccccagaccatcgtcgaccatggcgtgaccaagcagatctggctgcagaacgccgcctatgtctgggtcccgttcattgtcgtcgccgccgtggcggcctggttcggcatgaatgacctgacctcggccaaggcctcgttcgcggcccagtcggtgatcttccgccgcaagcacaactggatcatgtgctggctctatctgggcaccttcggctcgttcctgggcttttcggccgccttcccgctgctgaccaagaccctgtttcccgacatcaacgtgctgcagttggccttcctcggtccgctgatcggcgccgcctcgcgggccctgaccggcggcgtctccgaccggttcggcggcgagcgcgtcacccactgggccttcctggccctggccgccggcgtgctcggcgtgctggccggggtcggggcctatggcgccgcgccgtccttcccgatcttcttcgccagcttcctgtggctgttcttttggaccggggtcggcaacgcctcgaccttccagatgatcccggccatcgtccgcgccgacatgcctcgcctgatgccccaggccactgtcgagacccgtcagcgggccgcggaaatggagtcggcggccatcgtcggcttcacctcggccgtcggcgccttcggcggcttcttcatccccaaggcgttcggcgactcgctgaaggccacgggtgatccccagttcgccctctacctgttcctcggcttctacgtcagctgcgtggtcgtcaactgggccgtctacggccgcaaggcctcgctgctgcacgcgcccgccctcatcaaggttcccgcccaatga

SEQ ID NO: 59 - DNA, 1344 bp, Selenomonas ruminantium
atgacaacaaacgcagctctcagcggtctgggagataatcccagccgtaaggaaatactacgccattgggaaccggaaaacgccgccttctgggaacgctacggcaaaaggattgccaaccagaatctggccgtctccacctgggcactggtgctgtctttcgtggtctggaccctttgggccaccattgccgctaaactcaacaccgtgggcttccacttcagcgatgaacagattttcacgctggcggccctgccgggtctggtgggtgccaccggccgcctcttctacacctatctgccgggactcttaggcggcaagacctccaccctcatcaccacagccctgctcctgctgcccatcatcggcttgggcaatgccctgcaggataccaccacctcctacgataccttcgtgctgctggtggcctttatcggcatcgctggggctaacttctccgcctccatggccaatatcggcttcttcttccccaaggccaacaagggtctggctctgggcatcaatgccggcgtgggcaatctgggcgtttcccttatctacctgacggcaccactgctcttaggctggaacctttcttccgttttcggtgacggtctcttaaacgcccatggcgatatggtttatctgcagaatgtctgctacttttgggctgtcccgacagtaattaccttagcacttatcgccctctttatggataatctccccctgccccagcaaagccccaagagtattctcgcaattttcggcaacaaacacacctggctcatgtgctggatttacacctgcggcttcggctcctttatcggcttttcagctgcgctggtcctgctcgtggccaaagaatttcccgatgtctccttctccatggctgcgttccttggcccctttatcggagctggtgtgcgtccgctcggtggctggctggccgataagatgggaagcggctcccgtgtgacattgctctccctctttctgatgctgggcgccagtctggtaacgctcatggggattcaggcacataacttcatgcttttctttggttccttcctcgtgctgttcctaaccacaggcttcatcaacggtgcttccttccgcatgattccctatatctttaacaatccctttcatgcctcgctggtgacaggcttcaccgccgccattgccgcttacggagccttcctgattccaaaaatcttcggctgggcttatgccagcttccaaagcgtggcccctgccttctatattctgattggctttacgcttatcaccattgtaattacctggtacttctacgaccgaaagagctccggcctgaactgctga

SEQ ID NO: 60 - DNA, 1293 bp, Bacillus cellulosilyticus
atggcgagaatcacaaaatggaatccagaggatgaacatttttgggatacagaggggaagtatcatgcgcgaagaaatttatggatatcaataccttcactatttcttgcgtttgcagtttggcaaatttggtctgtagtagcggtaaatttaaatgatgttgggttttcttttaccgatagagaactctttttacttgctgcactacctggacttacaggtgcaactttaagaattatttatacttttttagtacctatttttggtgggagaaattggactgttattagcacagcctccttattgataccttcagtaggaattggtattgcagttcaaaatccggatacaccatttataacaatggctatattagccgccctttgtggattcggtggtggaaacttttcatcaagcatgtcaaacataagctttttctacccgaaaaaggctaaaggaactgcgcttggattaaatgcgggaatcggaaacttaggtgttagtgcagtgcaattacttgcaccacttgtagttacctttgcactgtttggagcatttgcaggagcgcctcaatacttaggggacggaacccaggtttacttacaaaatgcagcttttatttgggtgattccaattatactgacggttattgctgctatttttggtatggataatttacctggtacgaaagcatctattaaagaacaatcagtcatctttaaaaataagcatacgtggatcatgacttggctatacacgatgtgttttggttcgtttatcggttatgctgcagcatttccattgctcattcgcacagaatttcctgaggtcaatgcgatggcatttgcatttattggtccctttattggtgctgcgattagaccactaggtggttggctttcagataaattaggtggagcatttgttaccttttgggacattattttaatgataggagcaacactcggtgttctttacttttataatgctggtaatttcacagggtttttgattatgtttatcgtattattttttgccactggtatcgcaaatggatcaacatttagaatgattccgttcatctttaatcagaaagaagcagccgcagtgttaggttttacagcagcaattgcagcatatggagcatatctgattcctagcatttttggttggtctatagatactactggaacagcaaatttggctctttatattttcatagcttactatgtaatcagtttagtaatgaactggtactactactcgagaaaaaatgctgaagtgaaatgttaa

SEQ ID NO: 61 - DNA, 1296 bp, Bacillus cellulosilyticus
gtggaaaaattaacagtatggaatcctgaggacaacaaattttgggaagaaaaaggtaaaagaattgctaataaaaatttaaaaatttctgtatttgctctaatactagctttttgtatttggcaactatggtctgttacagcaacaaggttaaatgatgttggatttaactttacaaacagtgaattatttacacttgcagcactacctggattaactggtgcaacattaagattagtttacacatttttacctggcttattaggtgggaaaaaaacgacaatactcacaactgtcgtactccttattccggctataggaattggttttgcagtgcagaatccagaaacttcatttttcacaatggcattacttgctgctttatgcggattgggaggaggaaatttagcttcttcaacagctactattaatccattttttccaaaacaatcaaagggtacagcaaatgggattaatgttggaattggaaatttaggagtaagtgtcgtacaatttgttactccaattgtcataggcttagggtttataggagccattactggtggtgctcaaatattgccagatggttctgaagtatacattcagaatgctgcatttatttgggtagttcctattattgttgcaactattttaacaatattttttatggatgaattacccaatacaaagcaaagtgtgaaaagtcagctttcagtattgaagctgaaacatttctggatcatggcttggttatatatcatgtgttttggttcattcattggctttgcggcagcatttcctttgttaattagagctgagtttccagagataaatgctgtagcttttgcgtttttaggtccattaattggcgcatctttacgaccagcaggtggttggttgtcagataaagttaacagtggtgcaagagtgactttttggaccataatcgtaatgatgttaggaacaggtggtgccatatttttcttaaatatacaaaacttcattgggttcttaattagtttccttctgctgttcgccggtactggaattgctaatggctctacatttagaatggtgccatatatagttgaagaaaagcaagctgcccctgtcatgggtcttattgcagcattagctgcctatggtgcatttttcattccgaaaattttcggttggtctatcgaatcgaccggaaacgcaaatgtcgctttaatcatttttatttgctactacttagtgagtttagctgtatgttggtattggtatactaggaaaggctgcggtcaacattgttaa

SEQ ID NO: 62 - DNA, 1593 bp, Halomonas halodenitrificans
atgaccaggaagaatgccgacatcgaaaggtgggatgtcgagaacgaggagttctgggaatcggagggcaagcgagtcgccaaccgcaacctctggatctccattcccagcctcctgctgggcttcgccgtctggctgatgtggggcatgatcaccacccagatgcagaacctgggcttcccgttctcggtggatcagctgttcacactgaccgcgatcgccggcctcgccggcgccaccctgcgtatccccgcatcgttcatgatccgcatcgccggcggtcgcaacaccatcttcctgacgaccgccctgctgatggtccctgccctggggaccggcatcgcgctgatgaccccccagacgcccttctgggtgttccaggtgctggcactgctctcgggcatcggcggcggcaacttcgccaactcgatgagcaatatctccaacttcttccccaagaagcagcagggctatgccctgggcatgaatgccgggctgggcaacttcggcgtcaccaccatgcagatcctgattcccctggtgatgaccgtgggcctgttcggtgccttcggcggcgatgccatggagcttgagaaggccagcggcacgctgatcggtcgcatcgaggcgggcaccgacacctggatccagaacgccggtctcgtgtggatgctgctattgatcccgctggccttcgccggctggttcggcatgaacaacctgcgcaccatcacgcccaactccggctcgcccctgcaggccttcggcaagattctcggcctctacggggtcggcgtcgtgacctccatcgtcggcgtggtagcgctgggctatctcaacatgtgggtcgccctgccgctgaccatcgtgctgaccgtggtgctgctgcgcctgatccccggggatatcaagcccgccatcaagaagcagttcgagatcttctccaacaagcacacctggtcgatgacggtgctctatatcgccaccttcggctcctttatcggcttctccgcggccctgcccctctccatctccgtgatcttcggcaacatgatggaagtggccgccgatggcagcatggtccgggtcgccaaccccgacgcccccagcgccctgacctgggcctggatgggccccttcgtgggcgccctgatccgcccggtgggcggctggatctccgataagctgggtggctccatcgtgacccaggtcatcaccgccatcatggtggtgggctccgtggccgccggctacgtcatgatgctggcctacaactccaccgaccccaaccagtatttctggatgtttctgctgctgttcatcctgttgttcgccgccagcgggatcggcaacggctccaccttccgcagcatcggcttcatcttcgacccacagcagaagggcccggcgctgggctggacctctgccgtggccgcctatggctcctttatcgccccccgggtcatgggcgagcagatcaaggccggcacgccggaactcgccatgtacggcttcgcggttttctatgccgtctgcctgctcgtcaactggtggttctacctgcgccccggcgcctatgtgaagaacccctga

SEQ ID NO: 63 - DNA, 1434 bp, Corynebacterium efficiens
atgaccttagcaggtcacgccgtgttagattggtttcaatgcagtcacggaagggtttccggaacgcccttcgaccccaatcagaagaggcataaagtgacagaactcaacacaaagggaaaaactctccacgggtgggatcccgaggtccccgagcagtgggattccaggatcgcctggcgcaccctggccattaccacattttccctcatcatcggcttcagcgtctggtacctggtctcggccatcgccccgctgctcaaccgtatcggtttcgacctcagcgcggcccagctctactggctgaccgcggtaccgggactggccggaggtattctccgtctggtcttcatgttcctgcccgcccgcatcggcacccgcaacctggtggggttctcctcagccctgtttctcatccccatgttcggctggttcctcgcggtccagaacgccaacaccccctactggtggctgctggtcctggcggccatgaccggaatcggtggcggttgcttctccgggtacatgccctccaccggctggttcttccccaaggccaagtccggcaccgccctgggtatccaggcgggtgtgggcaacctcggggtctccgtgatccagttcctcggtccgtgggtgatgggtttcggtctgctgggcatcggattcatcaccccgcagcgcacggtggagggcagtgaggtcttcgttcacaacgccgccatcgtgctggtgccgtgggcgatgctggcctcggtcctggccttcctgttcctcaaggacatcccgatgaaggtgaacttcagggaccagttgaacttcttccgcaacaagaacacctggatcctcagcatcgtctacatgatgaccttcggggccttcgccggtttcgccgcccagttcggtctgatcatcaacaaccacttcggtatcgcctccccgatggcagagcagttccccgcggaggcgctgcacgccggtgccacctacgccttcctcggccccctcatcagtgccctggtccgtgcaggatggggcccactgtgtgacaagttcggtggtgcggtgtggaccttcgtcagtggcgtgggcatgatcgcctccaccgtggccgccgccatcttcctgtcacgggcggagaccccggatgatttctacccgttcctgtggtccatgctcgccctgttcttcttcaccggtatcggcaacgccggcaccttcaagcagatgccgatgatcctgcccaggaaacaggccggaggtgttatcggatggacaggagccatcggcgcattcggccccttcgtggtcggtgtgctgctctccatgacccccaccgtgaccttctactggggctgtgtggtcttcttcaccatcgccaccgccctgacctggatctactatgcacgcccgaacgccccgttcccgggataa

SEQ ID NO: 64 - DNA, 1368 bp, Salinispora tropica
atgacgacgagcgtgcccgcgacgagaacagcggaggagatcgacctgcaacgtggcaggggccgctggattggccactgggctccggaggacgatcatttctggcggaccgccggccgggccgttgcccggcgcaatctcatcttctccatctttgccgagcacatcggtttctccgtctggctgctctggagcatcgtggtggtccggttgggtgatgtcgggtggacgctgacaaccagccaggcgctctggctgaccgccgtgcccagtggcgtcggggcgctgctgcgactgccctacaccttcgcggtgccggtcttcggcgggcggaactggaccgtgatctccgccctgctgctgatcatcccggctgccgggttggcctgggcggtgcagcacccggagatcggcttcgtgccgttgctgctgatcgccgccaccgccgggttcggcggcgggaacttcgcctccagcatggcgaacatttcgttcttctatccggagcgggagaaggggtgggcgctcgggctgaacgcggcgggcggcaacatcggggttgccgtggtgcagttcctggtgccgcaggtcatcgtgctcggcggtggcctcgccctggcccgagccggcctgatgtacctcccgctcgcggtgatcgcggcggtctgtgcctacctgttcatggacaacctggccgaggccaaggcggatgtggggccggtgtggtcctcgctgcgggaccggaacacctggatcatgtcgctgttgtacgtcggcacgttcggttcgttcatcggttactcggcggccttcccgacgctgctcaacggggtcttcggccggcccgacatcgcgttgtcctgggccttcctcggtgcggcggtgggttcactctgccgacccttcggtggccgtctcgccgataccatcggtggcgcccgggtcaccgtggccagcttcatgttgatgaccgccggtgcgtacctggccctgtggtcggtgcgggagcgctggctggagctcttcttcctggcgttcatggtgttgttcgtggccaccggagtcggcaacgggtcgacctaccggatgatctctcggatcttccaggtgcggggggaggagctcggcggttcgccggagatcatgcgcgccatgcgccggcaggcggccggggcgctcgggatcatctccgcgatcggtgcctttggcggcttcctggtcccgatctgctacgcgtgggcgaagtcggcgtacggcagcatccagcccgcgctgtggttctatgtcggcttcttcctggtgctgaccgcgctgacgtgggctgtgtacctgcgaccgggggcgcggctggcctcggctcgggtgtga

SEQ ID NO: 65 - DNA, 1206 bp, Bacillus licheniformis
ttgaaattggcggatttgaggaagagcggacacgcgccttccttgttgtcatcttttttatatttcgatgtcagctttatgatttgggtgttgctgggggcgcttggtgtttatgttacggctgattttgatttatcgccttcacaggtcggattgattgtcgccatacctactttggccggatcgtttttccggattgcgctcggcattttaaccgaccgtttcggaccgaaaaagacggctgttggcggaatgctggtgacgatgattccgttgttatggggatggcagttcggttcatcggtcgccgagctgtatatcatcggaattttactcggtgtggcaggcgcaagcttttccgcttcccttcctatggcgagccgctggtatccgccgcacttgcaaggtcttgccatggggatcgccggggcgggaaacagcggaacactgcttgctacgctattcggccctcgccttgcggagcaagtgggctggaacggcgtcatgggactggcgctgattcctttaaccctcgtgttattcagctatttccttatggctaaagaacctccgaatcagccggctcctaaaccgctcaaagactattttgccgttttcaaagaaagggacacttggtatttttgccttctctacagcgtgacattcgggggttttgtcggcctgtccaactttttaagctacttttttgcatcccagtatgccgttccggcggtaagagccggcgaatttgtcacgcttgtcgttgcatccggaagctgcctccgccctgtcggcggattgattgccgataaaatcggcggcgtgcgtttgcttcaattcctctttatcggagtggctctgtgcatgttctcggtcagtatgctcccgtctctaggcgttgtcacagccgcattatttatcggcatgggctgcctcggaatggggaacggcgcgatattccagtttgtaccgcagcgatttcaacaagagatcgggatggtgacggggatcgtcggcgctgcggggggaatcggcggattcttccttccgaatatcctcggaacgctgaagcaaattacaggtacgtattcaagcgggttcctaacctttaccgttattgcatttttagcgctcggtctgcttttgtttgctcaggccggatggaaaaaacagtggaaagccgaggagaaatcaatccgaatttaa

SEQ ID NO: 66 - DNA, 1227 bp, Geobacillus sp.
atggagaagaaaggattttggcaaagcgggcacaagccctccctgttcggtgcttttttgtatttcgatatcagcttcatgatatggggcatgctcggaccgcttgcggtagtcattgccggagattatccgatggatccggtgcagaaggcaaatctggtggcgcttcccgttctgggcggctcgatacttcgactcgtattaggtttccttgccgatcgcatcggcccgaagctaacggctcagatcgggatggtcgtcacgctggtccctcttttgcttggctggttatgggtagattcccttgatcaattgtacgtcgttgcgattcttctcggcgtcgcgggagcttcgttcgccgcagcgcttcctcttgcgggacagtggtatcccaaagaacatcagggtctggcgatgggtatcgccggagccgggaacagcggtaccgtcctggcgaccctgttcgccaaccggttggcgcagcatttcggaagctgggagattgtcttcggtctcgccatcatacccattgtgttggtcttcatctacttctcggtgtttgcacgcaacagtccgaatcgacctgctcccaaacggctgtccgaatatggcaatgtgcttaaacagcgcgatgcttgggtattctgtgccctgtactgcgtgacgtttggcggctttgtcgggctcgccaactatttaacgatctttttcaacgcccagtatggcctttccgcggttcaggctgcggacattacaacgatctgcgtcattgcagggagcttcttccgtcctgtaggcggctttctggccgatcgtatcggcggctcgcgaatgctgatgtttctctatgccggagctgccattatgctgatcggcgtctccttcttgccgccgctatggcttgtcgtcacgttgctgtttatcggcatgatgtgcctgggcgcggggaatggttccgtatttcagcttgtccctcaacggtttgccggcgagatcggcctggttaccgggattgtcggggctgccggaggcttgggcggctacgcgctaccgctaattttgggtcgattgtaccaagcgacaggctcatacaccgccgggttcatcattctgagcttcattgccgcggcatcgctggcccttacgattgtgatgcagctgaaatggcggcgcagctggctccgcggcgtgccatccggcgcgcagaccggatcggctgaggcgtga

SEQ ID NO: 67 - DNA, 1221 bp, Caulobacter sp.
atgctctcccgcgatttcctgaaggccggccacacgccgaccctgttcgccgcgttcctgtatttcgatctgagcttcatggtctgggtgatcctgggtccgctcggcgtggccatcgccaaggacttccacctcgatcccgcccagaagggcctgatggtcgctgtgccggtcctggccggggcgctgctgcgcctggtcaatggcgtgttggtcgaccgcatcggtcccaagaagacggggatgatcagccaattgatcgtgctgaccggcctggtcctggcctggttcctgggcatccacaactatcaccaggtgctggccctgggcctggtgctgggcgtggccggcgcctcgttcgccgtggccctgccgctggcctcgcgctggtatccgcaggagcatcagggcctggccctgggcatcgccggggccggcaactccggcacggccctggccgccctgttcgcgccgatcctggccaagcacttcggctggcagaacgtgatcggcctggccgccatcccgctagccgtcgccttcgtggtctatatgctgctggccaaggacgcccccgagcagcccgcccccaagaagctcgccgaatatatggacgtgctgaaggtgccggacgcctggtggctgatgctgctgtacgcggtcaccttcggcggcttcgtgggcctggcctcgtcgctgaccatctatttcaacgccgaatacggcctgaccccggtgaccgccggcttcttcaccgccgcttgcgtgttcgccggctcgttcatccgtccggtgggcggggccctggccgaccgcttcggcggggtgcggaccttgaccatcgtcttcgccctggccgccttgggcctcgccacggccagcttccagatgccttcggcctggatcgccctggcggtgctgatgttctcgatgctggccctgggcgccggcaacggcgcggtgttccagctggcgccccagcggttccgcaaggagatcggcgtcatgaccggcctgatcggcatgaccggcggcatcggcggcttctacctggcctcgagcctgggcatggccaagaagctgaccggttcctatcagatcggcttcctcggcttcgcggccctggcggtgttcgccctggtcgccctgcacagcctcaaggcccgctggcgcgccgtctggccgaccctgcacggcgacgccgcgcccgttcgcgtctga

SEQ ID NO: 68 - DNA, 1215 bp, Azoarcus sp.
atggataagaaatcgtttctgcaggcaggtcatactccgaccctgtttgccgcgttcatgtatttcgatctcgccttcatggtgtgggtcatgttagggccgcttggagtacagatcgcgaccgatctcggcttaacccacgcccagaaaggaatgatggtggcgacaccggttctcgccggggcgttgttgcgtttcgtcatgggcatgctggtagatcatctgaagccaaagctgaccggtgcaatcgggcaggtgatcgtcatcgctgccttggcttatgcgtggcagcatggcatccactcctttgaagaaaccttgattctcggcctcttccttggcgttgcgggcgcctcgtttgccgtggcgttgccgctcgcgtcgcgctggtacccgccggagcaccaagggacggccttgggtatcgcgggtgcgggcaactcgggaaccgcgctggcggcgctgtttggcccgggcctcgcggcgagcttcggctgggtgaatgtcttcgggctggcgttgatcccgcttggcttggtctttgttgcatatctgctgatggcgaaggatgcgccggagtgtcctccgccgaagcgactcggtgagtatctggctgtcctgaaagataaggatgcctggtggttcatgttcttctacagcgtgacgttcggcggcttcgtcggtctggcctcgtcgctgacgatctatttcaatacccagtatggccttgacgcgaagatggccgggtacttcaccgccgcgtgtgtttttgctggcagcctggtacgtccgatcgggggcaatctggccgacaggatagggggcatcaagtcgctttccgtggtgtatatcgctgcggcggtcgccttgagcatcgtttcagttggattgccgagttcctggctggctctggctgttttcgtatgtgccatgctgtccctcggcatgggtaatggagcggtttttcagctcgtgccccagcgtttccgcaaggagatcggcgtgatgacggggctggtaggcatggccggcggtgtaggcggcttctatctggcgtccagtctgggctattccaaacaggtgagcggatcctatatgcccggctttctgatctttgctggactcgcactcgcagccctcgtcggcctgaccgcagtgaagaggcgctggagaaccacgtggggcgccccgcacctgaccaccgcgaagatctga

SEQ ID NO: 69 - DNA, 1236 bp, Xanthomonas campestris
ttggccatcgcattcggagatgcctctatgcagcgttcgttctggcgatctgggcacacgcccaccttgttcgcatccttcctgtatttcgacctgagtttcatggtgtggtatctgctcggtccgctgcaggtgccgatcgcgcaagcgctgggattggacacgcagcagcgcgccttgatggtggcggtgcccatcctgtgcggcgcggtgttgcgcctggtgttgggcatgctggccgaccgtatcggcgccaagcgcgccggcgtggtggcgcagttggcggtgatcgcctcgttgtttggtgcctggcaactcggcgtgcacagcatgggccaggtgctgctgctgggcgtgctgctcggcattgccggcgcctcgtttgcagtggcgctgccgctggcatcgcgctggtacccgccggaacaccagggcacggcgatgggcattgccggtgccggcaactccggcacggtgctggcggccttgttcgcgccgatgctggcgctggcattcggctaccagaacgtgttcgggctggcgtgcattccactggtgctgacgctgctcgtgtttgtgttgattgcccgcgaagcgcccataccggttgcgcgcaagcgctgggccgattacggccgcgtgctggttggcaatcgcgacgcatggcgcttcatgtttttttactcagtgacctttggcggcttctccggatttgctagcgcgttgccgggttacttccacgaccagttcggtttcgatgcgcgcaccgcgggctgggccacggccgcctgcgtgctggccggctcggtgatgcgcccgctcggcggtgtcatcgccgaccgcgttggcggcacgcgcgccttgctggcggtgtacttgctggtcgccacattggtgggcatcgccggcttcggcgcaggtggggccacgatcaccttggggctgttcgtgctcacgctgctgtgtctgggcgctggcaatggagcggtgttccagctggtgccgcagcgcttcggccaggacatcggggtgatgaccggcctgatcggcatggctggcggcatcggcggttttgcattggccgcggggctgggcgtgctcaagcagcacaccggcagctatgccatcggcatgtggttgttcgcggcgttcgccctgggtggctgggcgctgctggccggcgtcaagacccaatggcgcagcgaatggtccaccgccggcgcggcgcgcgtctga

SEQ ID NO: 70 - DNA, 1212 bp, Pseudomonas stutzeri
atgagcacaagtttctggaaagccggccacgcgcctaccctgtttgcctcctttctctatttcgacctgagcttcatggtctggtacgtgctcggcccgctcggcgtgcagatcgccgccgacctgggcctgaccacccagcaacgcgcgttcatggtggcgacgccgatcctcgccggcgccgtgctacgactggcgcttggcatcctcgccgaccgcacctcaccgaagaccgccgggctgttcggccagagcgtggtcatcgttgccctgctagtggcctggttgcacggcatcaacagctatgagcaggcgctgctgctcggcctgttcctcggcatggctggcgcctccttcgccgtggcgctgccgctagcctcgcagtggtatccggcggaacatcagggcaaggccatgggcatcgccggcgcgggcaactccggcaccgtgctggcggccctgttcgccccggtgctggcggcgatcttcggctggaacaatgtgttcggcctggccctgatcccgctggtactcacgctcatcatcttcgccagcgtggcgaagaacgcgcccaaccgcccggcacccaagtcgttggcggactacatgaaggcactaggcgaccgcgacagctggtggttcatgttcttctacagcgtgacctttggcggcttcctcggcctggccagcaccctgcccggctatttccacgaccagtacgccttcgacccggtcaaggccggctattacaccgccgcctgcgtgttcgccggcagcctgctgcgcccactcggcggtgccctggccgaccgcatcggcggcattcgcgcgctgctggtgatgtacacggtcgcggccatctgtattgccgctgtcggcttcaacctgcccagttccacggccgccctggcgctgttcgtggtcgccatgctcagcctcggtgccggaaacggtgcggtgttccagctggtgccgcagcgtttcaacaaggaaataggcgtgatgaccgggttggtcggcatggctggcggtatcggtggcttcctgctcaccgccgggctgggcgcggtcaagcagtccaccggcgattaccagttcggcctctggctgttcgccagcctcggtgtgctcgcctggttcggcctgcatggcgtcaagcgtcgctggcgcaccacctggggttcggccgccgtcaccgccgcgcgggtctga

SEQ ID NO: 71 - DNA, 1266 bp, Methylobacterium nodulans
atggccagtttcaagaccgtgatgaaatcggggcatcccccgacgctgtttgccgccttcctgtatttcgacttctgcttcgcgatctgggtgctgaacggcgccatgggcccgttcatcaccgagacctatcggctcaccccggcccagaccgggttcatgatctccctgccgatcctcgccggcgccatcatgcggtttccgctgggcgtgctcgcccagtatatcggccgcaagaacgccgccatcaccgagatggccctcatcatcctggcgatggcctacggcttcttcgtcgtcagcagctatggcgacgtgctcgccatgggcgtcctgctcggcatcgccggcgcctccttcggcgtcgccctctcgctcggctccggctggtttcccgcgcagcacaaggggctggccatgggcatcgcgggcgcgggcaattccggcacggtgctcgccgtgctgttcgctccgccgctcgcccaggcctatggctggcaggcggtctacggctttgccggcgtcgtcatgatcctgccgctgctggtcatgatcatcttcgccaaggagccgccggaccgcgagcaccagagcttccgggagcacatctcctgcctgttcgagaaggacggctgggccttcaacctgatctacgtgatcaccttcggcggcttcatcggcctgtcgaacttcctgccgaccttcttctacgagcagttcgccgtgaccaaggtcgaggcggggcggctgaccatgctggcggcgctgatgggctcaggaatccgggtggtgggcggctacttcgccgaccggctcggcggaatcctggttctcaccgtggtgctgctggcggccgtgggctcgttcctgctgctgaccgccacgccgccgctgctgctgaccacgatcctgttcatggtctgcttcgcggctttgggtgcaggcaacggggcgctgttccagctggtaccgctgcgctggccgagcaacacggcggtggcgggctcgatgatcggggagatcggggcgctcggcggggcgatcctgccgaacgcgatgggcctgtccaagcagttcaccggcggcttcgcggcgggtttcgtgggctacgccgtcttcaccgccgtggtcctcggctgcctgaccctgtggtcgcgccagtgggtcggccgctgggtcggcccccgcggcaaggtgctcgccgccgggaccgcctccgcgcaggcggagggcgacctcctgccggcggcagcacagcgcgcctga

SEQ ID NO: 72 - DNA, 1398 bp, Burkholderia phymatum
atgaaaaacctgttgaattcgcttgcgagcggtaactggcgcgcgctgctcgcgtgcttcctttacttcgataccggcttcaccgtctgggtcatgttcgggccgctggcgccgttcatcaacaagagtatcgcgatgtcgcccgcggaactgggctttctcgtcgcggtgcccgtgctcggcgcggcaatcctgcgcgtgacgcttggcaatctctatcaggcttgcgacggtcgacgcgtggcgctgatgggcgtcgcgctgtcagcgattccttcgatcgtgctgctgctgatgccaggcgcgccgtcatacacgctgctgctgattctcggcgtgtttctcggcgtcggcggggcgagcttcgcggtcgcgttgccgatggcaggcagcaactatccgccgaaagtgcaaggcctggtgctcggcctcgcggccgcgggcaacatcggcgcggtgctggacggcttcatgttcccggcgcttgccgatcatttcggctgggcgaaggctgcgggcgccgcgctgccgctgctgggcctcgctgccgtcgcgctgttcttctgggccagggatctcgggcagaaaacgggcagcggcgcacaggcgctgcgcagcttcatcgtgacgctcgcgggtctcgttgcgctcgtcgtcgccgtgcatgcgggcgtgttcggcgcgggcaagacgggtgtgctgctgctgcccgtgctcggcgcgctgctcgcgattgccgtgctgccgaagcactatcgcagcgtgctcgtcgaaggcgacacgtgggtcgtgatgctggtctacagcattacgttcggcggctttgtcggcatgtcctcgtatgtgacgacactgctgatctcgctgtatcagatgccgcgtctcgaagccggactcttcatgtcgctgctcgcgtgtatcggtgcgcttgtgcgtcccatcggcgggctggtcgcggatcgcatttcgggtgtgcgtgcgctggtgattctgctcgcggcgatctcgctgtgcgacttcctgttcgctgcatggatgccgcccgtttccgctggcatcgccttgctgatcgcgatgtatgtgtgcttcggtctcggcaacggcgcgacgttccagctcgtgccgcagcgctggaagggcaagacgggcctgatgtcgggcatcgtcggcgcggcgggcggtattggcgggttctatctgcccgtgatcatgggcatcgcgaaggaaggcacgggcagctatcagatgggcttcgcgacgttcggcgtgctgtcggcgctcgcgttcggtctggtcgtgctgcatcgcgcgcgctggctcgagtgggcgctgccgaaggaaagtgcggtggtgatcgagccgatccgcgcgggcatcagcgtggatagcggagcttga

SEQ ID NO: 73 - DNA, 1419 bp, Salinispora tropica
gtgtacgtcaaacccgctccagacgactcgacgcccgacgaaacggcgaccgagcagaacagccgtaacgatcgtgggcgcacccgggtcctgaccctgtccaccatcggcttcaccgtcatgttcgcggtgtggctcatgttcggcatcctcggcaagccgatcagcgaggagttcgggctctccgaggtgcagctgtcctggatcatcgccgccgccgtgctcaacggttcgctctggcgactccccgccggcattgtggcggaccgggtcggtgggcgccgggtgatgaccgcgatgctcctcctgaccgcggtcgcctcattcctggtttcccgcgccgattcgtacgcgatgctgctggtgctggcgttcctggtcggtttcgctggtaactccttcacggcgggtatcgcctggaactccgcctggcagccgcgggagaagcaggggttcgcgctcggcctgttcggtgccggcaacgtcggcgcctccgtcaccaagttcatcggcccgccgctgatcgccgggaccgccggcgccacctacctcggcgtcgttgagggcggctggcgcctcgtccccgtcgtctacgcggtgttgctgctcgccctcgccgcggccacctggttcatcactccgcgtcaggaccgcgtaccgagccacggcaccccgctacgcacacagctcgagccgctcaagcagctgcgagtgtggcgattcagcctgtactacgtggcggtgttcggtgcctacgtggcgctcgccgcgtggctgccgacctactacatgaacaactacgacgtgtccctgcagaccgcggcctacctgaccgccctgtacatcttcccggcctcgctgctgcgaccggtcggcggatcactctccgaccgtctgggggcccgccgggtcatgtactggacgtttggcctcatgctgctcagcacggggattctgatgatgcccccgggccacatcgtcgtcgaccaccctgacggcacgcagaccacccacctcgcctaccagctcggcatcgtgcccttcaccctgctggtcgtcctgctcggctgcgccatgggcatcggcaaggccgcggtgtacaagcacatcccggagtacttcccacgccaggtgggggcggtgggcggcctggtcggcatgctcggcggcctcggcgggttcttcctgcctccgctgttcgcctacaccaaggcctggaccgggctcccgtcgagcaccttcctggtcctgttcgtactcaccgtcatctgcgcggtgtggatgcacctaaccgtcgtgcgcatgctgcacggtgaatcgccccagcttgccacccacttcgaaaagccagaacccgctgaccagccggccgctcccgcctcggcggcgacccgtgcgtccaaggaggcccacgtatga

SEQ ID NO: 74 - DNA, 1302 bp, Corynebacterium efficiens
atgaccaacgcccgcgatcaccacacccccctgaccaccgatccacctgtcgccaccagcccgacacgtgagacacccggtgcctaccgggtgctgaccatggccaccctgggcttcacgctgatgttcgccgcctggatgatgttcggagttctgggcatccccatccaggaagaattcggactgacggatgtccagctgtccctcatcagctcggtggccatcctcaacggttcactgtggcgcctgcccgccggaatcatcgccgaccgcctcggtggtcgcatcgtgatgacggtgctgctggtcgcctccgctgttttcagctacatggtctcactggccgattcctactccatgctcctggggctcgcgtttgccgtgggccttgccggcaactcattctccgtcggcaacacctgggtggcagcctggttcagcaaacgccgaaatggtctagcgatgggggtgttcggtgccggcaacgtcggtgcatccgtcaccaaattcatcggccccgtcatcatcgcggccacagccggttccctgtacttcgggggattggtggagggtggctggcggctggtacccgtgatctacgccgtggccctgctggccaccgcggtgatgttgtggttcatcacgccggcacaggataagaaaccggggcagggtcggaaactctctgagatgctcgcgcccctgaaacagggccgcgtctggcgtttcagtctctactatgtggcggtcttcggtgcctatgtcgccctgtcctcctggatgcccaagtactacatcgacatgtacggtgtctccacctccaccgccgcgctgctgacggcgctgttcatcttcccggcctccctgatgcgtccggtggggggatccctgtccgaccgtttcggggcccgacagacgaccatcttcgccctgttgatcatgctcaccgccagcggcatcctcgcgctccccctcaccatcaacatcgtgctgttcaccctcctcctgttcacgctgggtgtgggcatgggtatcggcaaggcctcggtgttcaagtacatcccggattacttcccgggcaatgtcgggtccgtcggtggcctggtgggtatgttcggtggcctgggtggcgccttcctccccccgctcttcgccggtgtgaaaaccgcaacgggactggagcaggccaccttcctggtgatcttcgtgctcgtggccttctgcctggcctggttactgcgcgccatctccctgatgaagcgcacctcccccgacccgctgtggcgacgcttcggcatctag

SEQ ID NO: 75 - DNA, 1521 bp, Geobacter lovleyi
atgttagaggttgccacgtggaaatcacacaagaacctctttctcaacaccctggccttcacggtctgtttcgcagcttggatgttcaacggtgttctggttacctttttggtggacaatcaggtcttcaactggggtccggtcaagatcggctggctattcgggattccggttctcaccgggtcgctgttccgtctgccggccgggatgctgaccgacaagttcggcggcaagccggtctacggcacactgctgattttgtgcgccatcccgatgtacctcctctccaaagccgacagttttacctcattcgcgctctgcagtttcggttttggtatggccggagtcagcttttccatcggcatcgctttcacctctgtctggtatccccgcgaacggcaaggcacagctctggggatcttcggcgctggcaatgccggggcggctttgaccacactgttagcgccgacaatgctcaacaggctgaccaacaacggcgccaacatcgagaggtggcgcgatctgccggtttactacgcgctgatcctggcggctatgggtgtgatttttttcatcttcagcgataacaaaaaaccggccagttccggtaaaaccttcgtccagatgttgacgccgctcaagcatatgcgtgtttggcgtttcggcctctactactttctggtcttcggctgttttgtggccttctctcagtggcttgtcccctactttgtcaatgtctattacctgccgctggtaacagccggcctgttcgcctccatgttcagtcttccatcgggggtgatccgtgctctgggcggctggatgtcagataaatttggcggccgccaaattatgtactgggtgctgggcgcctcgacggtcatcagcctgatggtgatggtaccgaagatggagattcaatccccgggacggggggttatggcaaaacgagccggtgtcgtacaggcggtgacagacaagactgtcgtggtgaaagagttaaaggccacctctgaggtgctgggggagcaaccctatcctttaaatgcaaagccgactgttatggaaaactttgacgaccggatgctgattctccccgggaagcagacctggcaggagccggttgtcaaagtcggccaaactgtcaaaaaaaaggagctgctagccaaaggagtgacccgtatctatttccaggccaatgtctggatctttgccggactggtactggtgctggggaccatctgggggataggtaaggctgcggtttataaactgatcccggactactttccggaggaggtaggtgtggtcggcggtatggtgggcgtactgggcggtctgggcggtttcgtctgcccgatcgttttcggctatctgctggaatggacaggcgtctggaccagttgctggatgttcatgtttgtcctgtcggtggtctgtctggtttcactgcactacgttgtgcaaaagatgatgaaggataaacatccgggggatatgcgggtgtttgaaaataactga

SEQ ID NO: 76 - DNA, 1269 bp, Thiobacillus denitrificans
atgcagagccaacaatacaaggcatggtcggtcgtcagcatgagcacgctggcgttcacggtctgcttcatgatctggatgatgttcgccgtcatcggcgttcccatcaaacagcaactcggcctcaacgagacgcagttcggcatcctcgtcgccaccccggtcctgaccgggtcgctgatccgcgtgccgctcggcatgtggacggacaaattcggcggccgcatcgtgttcttcgtcctgatgctgacgacggtcatcccgatctggctgatctcctacgcgaccgagttctggcagtttctgctggtcggcctgttcgtcggcctggccggcggctcgttcacggtcggcatcgcctactgcgcgcgctggttcccgcgtgagcgccaggggctggcgatgggcattttcggcgcgggcaataccggcgccgccgtcaccaagctgctcgcaccgatcatcgtcgtcggatacggctggacgatggtgcccaaggtctacgccggactcatgctcgtcaccgccatcgtcttctggttcttcacctacaccgagcccgcccacaaggtgagcaagtcggtcacgatccgcgagcagcttgcggccttcaaggatccgaaggtctggcgctacagccagtactactcgatcgtgttcggcggctacgtggcgctcgcgctgtggatgaccaagtactacgtgagccagtacggcttcgatctcaagaccgcggccttcctggcggccgccttcagcattcccggcggcgtgctgcgcgcggtcggcggctacttctccgacaagtacggcgcgcacacgatcacctggtgggtgctgtgggtctcgctgctgtgcctgttcttcctgtcctacccgcagagcagcatcacgatccacaccgtcgacggcctgcgcaccttccacttcggcctcggcccgacggcgttcacgatcgtgatgttcagcctcggcatcgcgttcgcgatcggcaaggcctctgtcttcaagtacatctccgacgactaccccgacaacatcggcgtgatctccggcgtggtcggcctcgccggcggtctcggcggcttcctgatgccgatcatgttcggcgccctggtcgacctgaccggcgtccgctcgtcggccttcatgctgatgttcggcgtcgtgtgggtgtcgctgatgtggatgtatttcaccgaagtacgcgagatggacgcggcggcgcggggcgcgaagcgcgtcatcgccgcggacgtcatggagtaa

SEQ ID NO: 77 - DNA, 1284 bp, Cupriavidus metallidurans
atggccaccccaaacctcccctccagcaagccagaacccgtctcttccggtgcttggacgacgctctggtccagcacctttgccttcacgatctgtttcgccgtctggatgctgtttgccgtgctcggcattccgctcaagaaggaactcggcctgaatgacaccgagttcggcctgctggcagccacgccggtgctgagcggctccctgatccgcgtgccgctcggcatctggacggaccgttacggcggccgcatcgtgttctttgtgctgatgctgctgacggtgatccccatctggctgatctcgtacgcgcatacgctgtggcaattgctggtgctcgggctgttcgtcggcctggcgggcggctcgttctcggtgggcacgccatacgtggcccgctggttcccgcgctcgcgccagggcctggccatgggcatcttcggtgccggcaactcgggcgccgccttgaccaagttcgtcgcgcccgctctgatcctggccgccggcacctgggaaatcgtgccgagggtgtactcggtggcgatgctgatcaccgccatcgtgttctggctgttctcgcgcagcaatcccgcgcaccgcgtttcgtcggccaccagctggcgtgcgcaacttgccgtcatgcgtgatccgcgtgtctggcgctattcgcagtactactcggtcgtgttcggcggctacgttggcctctcgctgtggatgaccaagtactacatcggtgagtacggcttcgacatgaagacggccgcgttcctcgctgcctgcttctcgctgccgggtggcgtgctccgggcgatcggcggctggatctcggaccgctacggcgcgcaccgcaccacgtggtgggtcatgtgggtcagctgggtcacgttcttcctgctcagctacccgaggagcgacttcacgatccacaccgccaacggcccggagagcttccatatcgcgctctcgccaacggtgttcaccatcctgatgttcgtggtcggtatcgcgttcgcggtcggcaaggcctcggtcttcaaattcatctcgaacgatttcacacacaacatcggcgcggtctccggcgtggtcggtctggccggcggcctcggtggattcatcctcccgatcctgttcggcgcactggctgacctgaccggcatccgcaccagctgtttcatgctgatgtacggcgcggtctgcgtgagtctggtgtggatgcactacagccagcgcgcggcaaacgccaggccgacgcccgaaaccctgcaagccgcctga

SEQ ID NO: 78 - DNA, 1254 bp, Geobacter lovleyi
atggcatcccagacccacaagcaactttcagtactgaccggcagcacgctggccttcacggtctgtttcgcggtctgggtgatgttctcgatcatcggtatcccgatcaagactaacctgaatctgaacgagaccgagttcggcctgctggctgccaccccgatcctgtccggttcgttgatcaggctgcctctggggatgtggaccgacaaatacggcggccggatcgtgtttctggtgctgatgctctgcacggtgctgccgatctatgtcatcggtgatgccacccggtattggcagtttctggtgctagggctgtttgtcggtgtggctggcggctcgttttcggtggggatcagctacgtggcccgctggttcagcaaggcccgtcaagggtttgccatggggattttcggtgccggcaatgccggggctgccgtgaccaagttcgtggctccatcgctggtggccgcctacggctggcagatggtgcctaaggtgtacgctgtggcaatgctggccacctgcggcatcttctggctgctgacctattctgacccggctcaccgggtcagttcatcagtcactatgcgtgatcaactgctggcccttaaagatccgcgggtctggcgctactgtcagtactacgccatggtgttcggcggctatgtcgggctgtcgctctggatgaccaagtactacatcagcgagtatggcctctcaatccagactgcagcgttggtggcagccatctttgtgctgccctccggcgtaatccgcgccttgggcggttgggtctcggacaagctcggcgcccatgccgtgactaacgccatcctgtggatatcatgggtttgcctattcctgctttcgctaccccaagggggctttacggtcaagacggtgcaaggaccggcgacctttgtggtgggcctgaatgtctgggtatttacggtgctgctgtttgtggtcggtatcgcctggggattcggcaaggcctcggtcttcaagcatattgccgacgaataccccaagaacatcggcgtgatctccgggatcgtgggcttgatgggcggcctgggcgggtttgtgctgccgattgtgttcggcgccctggtagatctgaccggcatccgcagttcagccttcatgttcctgttcgccatgacctgcctgtcgctggtgctgatgtttttcagcagctccagccgcaaaggttcacacaaacttaaaatcgctgagattctcgaataa

SEQ ID NO: 79 - DNA, 1383 bp, Methylobacterium nodulans
atgcacgaaacagccacccccgcgagccgcgaccagggccgcgccctttggctttcgacgctcgcgttcacgatctgcttcgcagcctggacgatcttctcgatcatcggggtgcagataaagaaggacctcggcctgagcgacgcccagttcgggctgctcgtcgggacgccgatcctgacgggttcgctcatccgtctcatcctcggcatctgggccgaccagtatggcgggcgcgtcgtcaccgtggcggtgatgctgctcgccgcgctcgccacctatctcctcacctatgcctacgactacccgaccttcctgctcgccgccctcggcgtcggcctggctggcggcgtcttctcggtcggggtcgcctacgtctccaagtggttcccgaaggagaagcagggcaccgcgctcggcatcttcggcgcgggcaatatcggcgcggcggtcacgaagttcctggcgcccctcgtcatggtcgccctcggctggaaggcagtggcgcagatctgggcgctcggcctcgtcgtcatggcgctcgtcttctacctcggcaccaaggacgacccggacctcgccgcccgccgccgcgtcggcctgaagcccgagccgctctcggccatgctggcgccgctcgccaacctgcaggtctggcgcttctcgctctactacttcttcgtgttcggcggcttcgtggcgctcgcgctctggctgccccgctactacacgggcgtctacgggctcgacatcgtcaccgccggctggctggccgccgcctactcgatcccgggctcgctcttccgcgtcctcggcggcagcctgtccgaccgctacggcgcccggaaggtcatgtactggaccttcctcggctcctgcgcctgcaccttcctgctgtcctacccagccacccactacgtggtcagcggcatccggggcccgatcagcttcgacctcgcgctcggcccggtggcgttcacggccctgaccttcggcctcggcttcttcatgagcctcggcaaggcggccgtgttcaagcacatccccgtctactacccggaccgggtcggcgcggtcggcggcgtggtcggcctgatcggcggtctcggcggtttcgtcctgcccatcgccttcgggttcatgaacgacctcgtgggcgtctggacctcctgcttcatgctcctgttcgtggtggtcgcgggcagcaccgcatggatgcacgccgccgtccgcgccatggagaagcgcgcgcatcccgaattgcggcagccgaaggacctccccgaactcgaggccctgcgcgcggaggtcgagcgtctccgagcgctgcgcgggcgccctcccgttcccgcctcgcccctgaccggcgtcccggccgagtga

SEQ ID NO: 80 - DNA, 1362 bp, Caulobacter sp.
atgcagacggcgacgccatcgcaaccgggagccggatcggccctgacgatgagcacgatcgccttcaccgcctgtttcgcggtgtggacggtgttttcgatcatcggcgtcaagatcaagcaggacctgggactgagcgaggcccagtttggcctgctggtcggcaccccgatcctgaccggctcgctggtgcgggtgttcctgggcgtgtggaccgaccaatatggcggccgcctggtcaatctgctggtcatgctgtcggcggcggcggccaccttcctgctctcctacgcccacacctatccgcagttcctggtggcggcgctcggcgttggcctggccggaggctcgttcgcggtcggcgtggcctatgtctccaagttcttccccaaggaacgccagggcgcggcgctgggcgtgttcggggccggcaatgtcggcgccgccgtgaccaagttcgccgctcccttcgtgatgctggccctcggctggcagagcgtggcccagatctgggccggggtgctggccgtgctggctctggccttcttcttcaccacccgcgacgagccggacctgcaggcgcgccgccgcaccggcgccaagccgcagaacaccgccgcccagctggcgccgttgcgcaagctgcaggtctggcgcttcgccctctactacttcttcgtgttcggcggcttcgtggccctgtcgctgtggctgccgcactatctggtcgcggtctatcatctcaacatcatcgccgcgggcatgctggcggccgcctattccattcccggctcgctgtttcgcatcgtcggcggctggctgtcggacaagatcggcgcgcgcaaggtcatgtacctgaccttcggcgtcagcgcggtctgcgccttcctgctgtcctatccggccaccagctacgtggtcgacggggtgcgcggcccgatcgcctttcgcctggccaccgggctggtcccgttcgtgatcctgctgttcaccctgggcttcgccatgagcctgggcaaggcggccgtcttcaagcacatcccggtctactaccccgatcacatcggttcggtcggcggcctggtcggcatggtcggcggcctgggcggcttcgtgatgccgatcgcctttggcgccctcaacgacctcaccggcgtctggaccagctgcttcatgctgctgttcgtcctggtcgccggagccctgacctggatgcacctggccatcggccgcatggagcgcgccaacgcgccccagctggccaacctgccgcagcttcctgaaatggccagccttggcacggccgccccgacccacgccgcgcccgccgggcgcgccgccatccaacccgccaactcatga

SEQ ID NO: 81 - DNA, 1347 bp, Halomonas halodenitrificans
atgcaacatctcgaaggagtcacccggccccagcagtaccgggccctgggcctcagcactctcgccttcaccacctgcttcgcggtgtggacgatcttttccattatcggcatccagatcaagcaggacctggggctcaacgagacccagttcggcatcctggtcgccacgccgattctgaccggctcgatcagccggatcttcctgggcatctggaccgagcagttcgggggccatcgcgtgttcagcgtgttgatgctgctcaccgcggcctgcgtcttcctgctctcctacgtcgaaagctatgccatgttcctggtggccgcgctcggtatcggcctggccgggggggccttcatcgtcggcatcgcctacacctcctactggttcgagaaggacaagcagggcaccgcgctgggcatcttcggtgccggcaacgccggcgccgcggtgaccaacttcggcgcccccttcctgctgctggccctgggctgggagcgcaccgccgtggtctacgccgtggtgctggccgccgtggccgtcggcttctgggtgttcgccacggaggaccccctgacccgggcgcggcgtcgcggccagggagcccaggccacctccgcccgggcccagctcgagccgcttcgccacctgcgcgtgtggcgcttcgcgctctactatttcttcgtgttcggtgccttcgtggccctggcctcctacctgccgcgctactacgtgggcgcctacggcgtcagcatcgccgtggccggctcgctagcggccctctataccctgcccgccagcgtcttccgggccctgggcggctggatggcggatcgctacggggcgcgggccgtaatgtacctgacctttatcgcctcgctggtctgcctcttcctgctcgcttaccccgagacccgctacgtggtccagggcaaggagggcgagatcgccttcaccctggccatgccgctgtggggcgtggtggtgttgaccgtgctgctgggcttcttcatgtcactgggcaaggccgcggtcttcaagcacatcccggtctactacccggagaacgtcggctcggtgggcgggctggtcggcatgatcggcggcctgggaggcttcttcctgccgatcctgttcggcatcgtgctcgacctcaccggcatctggaccagctcctacatggtcatcttcatgctggtggcggtctcgctgatctggatgcacacggccatccgccgcatggaacgcaagaacgtgccggagctcggcgaggagcgctatcgctacctgcccgagatccaggaaccggccgaagagcatgccaggcgtcacggcccgcggccttga

SEQ ID NO: 82 - DNA, 1275 bp, Sinorhizobium meliloti
atgtccgctcttcaccagacgcagtcgacctataagggcgcaccaggacgcgctttgtgggtctcaacgggtgcatttacggtctgtttcgccatatggaccattttttcgatcatcggcgtgcgcataaaggatgaactcggcctgagcgaagccgagttcgggctcctgatcggcatgccgatcctgacgggctcgctcgtccgcatcgtcctgggcatctggaccagccggtatggcggccgcctcgtctacacgctcaccatgctggcggcagcactcgccaccttcctgctcgcttatgctacgacctatccgcagatgctcctcgcagggctgggtgtcggtctggcgggaggctcttttgccgtgggggtcgcctatgtttcgcctttctttccgccggaaaaacagggcaccgctctcgggattttcggtgccggcaacgtcggcgccgcggtcacgaaatttctggcgccattcgttctcgtcgccttcggctggcaggccgtcgcggaggtctgggcggccgcgcttctcgtcacggcggtcgtcttctggttctcgacggaagacgatccgcaattccgcgcccgccgcgatgtcggtgcaccaaggaagagcttcctgagtgaattcgagccactcaagaacattcaggtctggcgcttctcgctctactacttctttgccttcggcggcttcgtggcgctcgcgctctggctgccgcgctatctcgtcggcgtctacggtttcgacatcgagaccgccggcatgatcgccgccgcctattccattcccggcagtatcttccgcgcctatggcggcgctttgtcggacaagctcggcgcccgcaggatcatgtatgccatgttcgccgtgtctgccgtcgcaacggccattctgtcgatacctgcaggtgctgccggcggtgcgatgccgatcctggttaccccgatcgtcttcgtcgtcgtgaccttcgtgctcggcttcgtcatgagcctcggcaaggcagcggtctacaagcacatacccgtctattatccctcccatgtgggcgccgtcggcggcatcgtcggcatgatgggcgggctcggcggcttcgtcctgccgatcgccttcggcttcctcaaggatgtgaccggcctttggtccagctgcttcatgctgctcttcgtcatcgtagccgtctccatggtctggatgaatgtctcgatccggcagatcaagcgcgaggccgaccgaggtgtcccggccggggcgcttgcacgatag

SEQ ID NO: 83 - DNA, 1209 bp, Paracoccus denitrificans
atgcccgccgttccccccgttccgccatccgaggccagccgcgcgctgggcctctcgaccttcgcctttaccatctgcttcgccgtctggacgatcttctcgatcatcggcctgcagatccgcgagcagctttccctgaccgaaacccagttcggcctgctgatcggcctgccgatcctgaccggatcgctggtgcgcatcgggctgggcgtgctgaccgaccggctgggcgggcggctggtctatacgatgaccatgctttccgccgccgtcgcgacgttccttttgtcccttgctacgacctggccgcagatgctgctggcggcgctgggcgtcgggctggccggcggttcctttgccgtcggcgtggcctatgtctcgcgcttctatgccgaggggcggcagggcacggcgttgggcatcttcggcaccggcaatgtcggggccgccgtgaccaagttcgccgcgcccttcgtcatgctggcgctgggctggcaggcgaccgcgcagatctgggccgccgcgctggtgctgaccgccgtgctgttctggctgctcagcaaggacgatcccgtcaccgccgcaggggccggccgcaaggcgccgctgcgtgccgagttcgcgccgctgggtcaggtgcgggtctggcgcttctcggcctattacttcttcagcttcggcgggttcgtggcgctggcgctgtggctgccgcattacctgacgcaggtctatggtttcggtgtcgggaccgccggcatgatcggcgcggcctattccatccccggctcgatcttccgcgcctatggcggggtgctgtccgaccggatcggggcgcgggcggtgatgtatgcgaccttcatcgtctcgctggccgcgaccgccatcctgtcgatcccggcgggggtgccggtgccggtcttcctggcggtgattttcgtcctgggcttcttcatgagcctgggcaaggcggccgtctacaagcacatccccagctattaccccggccatgtcggcgcggtcggcgggctggtcggcatgatcggcggtctgggcggctttgccttgccgctgctcttcggctggctgcgcgaccagaccgggctgtggtccagctgcttcatggcgctgttcctgctggtcgggctttgcgcgctgtggatgcacgcctcgatccgccagatgggccgcgcgcccctgcaagccgcctga

SEQ ID NO: 84 - DNA, 1284 bp, Halomonas halodenitrificans
atgccacacctccccgaccgccgcgatcctgtcgtcgtcggctaccgcccgctggtggtggtattgctgtcgccgctggtctttgcgctggtgttcgccagctggaccatcttcgcggtgctggggctggagctgcgcgagccgctgggtctggatgaactcggcttcgccttcatgctggccacgcccatgctcaccggggccctggcggcgctacccatggcggcactggcccggcgtcatggcgggcgccgcgtgatgatcgcctgcctgttgctgatctgtcccttcctgtgggcgatcgcccgctccagcagctattcacacttcctgctgtccggcgccggcctggggctgggggccgggtctctggcggcggggctggtctatgtcggcgagctctcgccccggcggcatgttggcctcgccctgggcctctacggggccggcatgatgggggccggactgagctatctgctgctgcccctggtcagccaggcctatggctggcgcagcgcccccctgctctatctgctgccggtgctgacggtcgcgacgctgttgtggctgtttgccgatgacccggacctctccgtcgactctggcctcgccggcgtcgccgccggtacccggccgcgcctctcggggtggctgagggccttgcgacactggcgcccctggcgcctggccgtggtctacagcttcttctatggcgccttcgtggcgctgtcgctatggctgccggcctacctcgaggcccagtacgacctgggcatccgctacgccgccctgctggcgctgccctttccgctggcggtgggcttggggcaggtggccggcggcgtctggggcgatgtgcacgactttcgtgccttgcgctggtgggtcagcgcctgggtgctggtctgcctgtttctgctctcttatccccccttcgacatgcgggtcgagggcgtggaggggatgctgatgctgcgttattccgcgccgctgtggggctttctgacgctgctggtcgccatgggtctggtcatgggggtcgggcagggcagcctgatgcgcatgatccatcgtgatcacggccagcagctggccctggtgggtgggctggcgctgaccctgggcgggctgtttggcgccctgctgccggtgatgttcgccctgggcaaccactgggtgggcatccgcaccgcagggttcatgttcctctatgcctcgctggtgctgtgcatgctggtgatggtgtgggaccacgccagccaggcagggcagacgaggccctga

SEQ ID NO: 85 - DNA, 1203 bp, Lactobacillus fermentum
atgataatggaaactacacaacaggacgtggctcacgggagccgtctgaacgcttatactgcgttaattttagccaccctggccatgatcgtctgctttatgtcctggtcaaactttgcccccttagccgcccaggttgggaccatgttccacctgagtgtggcttccagaaccttgctgttggcgacgccggtgctgttagggtcgatcgcccggattccggtggggatcttatcggataagtatggtggtaagaaggtttacatcatcttgatgatcttcatcttaatcccgctgttcatgattccgcgggtgcactcctttgggatgctcctttttgcggccctcttagtcgggatggccggaacttcctttgccgtgggggtttcctacgcctcagtttggttccccaaggaacaacaggggctagcactggggatcgtttcgatggggaacatggggaacgccgtggcggccctgaccctgccgtacatttccaagtcccacggctttaccgccgtttacaattttttgatgatcctgaccgttgtgatcggggtgatcttcgccatcttctgtaaggaaatgccaactaacccgaacaagacgatgggtgaggccctgtcagtggctaaggaaagttccacttggtatctatccttgttctacttcctcaccttcgggctcttcgtggcctttactaacctgacgccgctctttttaaccgggatgtttaattactctcaggtgacggccggcctttacgccgccctctttgccggggtctgcaccattattcgtccggtcggtggtttcatggccgacaagatgcggccgatgatgcttttgcaatgggtctttgtggccattattgcctttgcaatcctaattatggtaagctttaagtcacaaccactctttatcgccgggattgtcctagttgggctcgccgctggggttggtaacggggttgtctttaagatggttccgtacgtttcccagggtaacaccggggccgtaacgggcttcgttggtgcaatggggggccttggtggtttcttcccaccactggtcatcggttggatcaaggaatggacgggctcttacgaactcgggatcggcttgttagtcttgaccggtgtaatttgtctgttcgcattatggcaccacttcattcgcggtgatgcacgtatcgttaagtaa

SEQ ID NO: 86 - DNA, 1509 bp, Bacillus clausii
atgatcaataagctgcagctaccgctgcaaacgatgaatctagtactagggtttatggtgtgggtaatcatctcggcgctgttgccctttatacaggaagatattgcaattcccgccgatcgggttgctatcttaaccgcaatccctgttgttcttggatcggttctacggattcctctcggctattacgccaacgtcgtgggcgcgcgaatggtgtttatcactagttttattctgctattgtttccggtttactttatcagcatcgcgacaagttttacccatctcgtggtcgggggattgtttcttggtatcggaggagcggtgttttcggtgggggtcacttcgttacctaaataccatctgaaggaaaagctaggtctagtaaacggcatatatggaatgggcaatttggggacggcgatcacgacatttgcagcgccagtaattgctacgcagatcggctggtcagctaccgtccaactatacttaattttgctgctggtatttgttgccctaaacgccgtcttcggcgaccgcaaagaaacgaaagtcaaaaccccgattatggaacaggtcaagggtgtatataaaaacgacaaattatggtatttctcactcttttatttcattacgtttggctcttttgtggccttcactgtctatttgccgaattttttggtcagtcacttcgagctgccgaaagtggatgcagggctgcggaccgcaggctttatcttgattgcaacgtttctccgtcccgttggagggtggcttgccgataaattcaagcctttgtttttgctaatgggggtatttatcggtatgacattggcggcggtggtgctggctttttccccatcactcgctttgtatacggttggatgtctgacgatagccgtttgtgcaggtcttggcaacggcattatttttaagttggtgccgttttattttaataaacaagcaggcattgtcaatggaatcgtatcgatgatgggcggtttgggtggatttttcccgccgttgatgctctcgttcatccattcagtgacaggtcaatactcgattggattcatggctttatcgcaggttgcgctcgccagctttgtgctagtcgtatggatgtattatcaggacaaattgactgttgcttcccaagtgttcaactcgactgggcaaggcattttggtgactgatgctaaaaagcgcatacatgctgtgaatcccgcctttacgagattgacgggttacgaagaagaggaagtattgggcaggaatccaaacttgcttaaatcagggcggcaatcatcggcattttatcagatcatgtggacggaaattatggagaagggcagctggcagggtgaaatttggaaccgcagaaagaatggggaagagtatctcgaactgttaaccatcaatgctgtaaaggacgaaaccggggacatcgttcattatgtcggcaccttcagcgatattacagatcaccccccaaggaagcacgcctga

SEQ ID NO: 87 - DNA, 1455 bp, Bacillus thuringiensis
atggtcggatttatggtttgggtattaatttcttccttaatgccgaatataaaaaagaatattacattatctgataatgaggttgcattggttacagcagtccctgtgatattaggatctttgatgaggattctattagggtattggacaaaccgttttggagcaagaatcaattttgtcattagttttttgatattactcttccctgttttttatattagtatttctgattcacttgttgatctagttattggtggtttagtgcttggaattggaggcgcaactttttctataggtgtaacttcacttccaaagtattacccaaaagaaaggcatgggtttataaatggaatttatggtgccggaaatattggaacagcaattacttcatttgcagctccattattagcaaactcaattggttgggtttcaactgtcagactgtttctaatacctcttcttatttttgctattttaaatttttttcttggtgattcaaaagaacctagagaaaacactccgttaggaaagcaaattaaggctgtttaccgaaatgaaaaactttggtttttaagttttttttactttattacatttggttcatttgttgcgtttacagtctatcttcccaactttttagtttcaaattttcaattgactccagtagatgccggaatacgtacagctatttttattacaattgcaacttttttgcgaccaataggtggttggttaggagataagtttaatccattactcattctattgtttgtgtttggtggattaacattttctggtgtactcttatctttctcaccaacaattacgttgtatacgataggatgcttgactgttgctttctgtgcgggaattgggaatggtgcaatctttaagcttgttccttattatttttccaaacaagcaggaattgttaatggaattgtatcagctatgggaggaataggaggtttttttccacccttgatactatcattagtatttaatattacaggacattatgcgataggtttcatggcattagcacaattttcacttgtaagctttgttattattgtttggatgtattatcttgaaaaattgagcttggaaacaaaaattattgaaagcgtcgcacaagggatgatggttactgatacaaaaggaattattaaaaagataaatcctgcttttacaagggtaacaggctatcaatctaaagaagtaattggaaaaacccctaatattttgagatcgggattacacaatgcgaatttttatcataaaatgtgggaaagcattcgtgttaatggatattggcagggtgaaattatgaataaaagaaagaataatgagatttattcagagtggctcaccattagcgcagtaaaaaatgaagtccaagaagtaaaatactatgtcggtttgtttagcgatttgacagaagagaagaagtaa

SEQ ID NO: 88 - DNA, 1302 bp, Burkholderia phymatum
atgaccgtcaaagccacatcgatcgatctgctgaactggcgcacgcctcctatgcgtgcatttcacttcgcgtggatggcgttcttcgtctgcttctttgcgtggttcgcatgcgcgccgctgatgcccctcatcaagcaggagtttcatctgacggcggatcaggtggcgaacatcaatattgccgctgtcgcgatcaccattctcgtgcgtctgatcgtcggcccgatgtgcgaccgcttcggtccgcgcaaggtctacgtcgcgctgatggtgctcggcgcgctgcccgtgctcggtgcggcgctcgcacacaactacacggcattcctgctgtgccggctcggcatcggcgcagtcggtgcgagcttcgtgatcacgcaatatcacacgtctgtgatgttcgcgggcaacgtggtcggcacggcgaacgcgacgagtgcaggctggggcaatgcaggcgcaggcgccgcgcagatgttcgtgccactgatgctcgcgggcatcgtcgcgctgggcgcgagcaatgccgatgcatggcgcctcacgctcgtgctgcccggcctcgccatgccgctgatggccgcgctctactggcgcttcacgcaggactgcccgcaaggtaacttcaacgaactgcgcgtgcgcggcatcgtggtcgatagcggcaagaagggcagttgggcgagccttctcgcagcgtcgcgcaactatcgcgtgtggatgctgttcgtcacctacgccgcgtgcttcggcgtcgaagtgttcatccacaacgttgcggccatttactacgtcgatcatttccagctctcgctgcgcgaggccggcctggcagcgggcagcttcggtctgctcgcaatctttgcgcgtccgcttggcggcctgctgtctgactggggcgcgaagcgccgcggactgtccgcacgctcgatgctgctcttcatgctgatcgccggcgaaggcgcgggcctgctgctgttctcgcaggcgagccatgcggcgttcgccgtggccgcgatgctgctgttcggtctcttcacgcacatggcgtgcggcgccacctacgcgctcgtgccgttcatcgatcgcaaggcgctcggcggcgtggcgggcatcgtcggcgcgggcggcaatgtcggtgctgtggcggcgggttttctggcaaagggcatgggcgacctgcatcaaacgctgatgatgctcggcggtctcgtaacggcatccgcgatctgcgcggtcgccgtgcgcttctccgccgagcacaccgcacgtgaagccgcactcggcgcaacgaattaa

SEQ ID NO: 89 - DNA, 1314 bp, Ralstonia metallidurans
atgaacggcaaagccacccggatcgatctgctgagtttcaagacgccgcagatgcgcgccttccacctgacctggatggcctttttcgtctgtttctttgcgtggtttgcctgcgcgccgctcatgccggtgctcaagggcgaattcggcctgacaccgaaccagatcgccaatatcaatatcgccgccgtcgccgtgaccatcctggtgcgactggtgatcggcccgctgtgcgaccgctttggcccgcgcaagacctacaccggcctgctggcgattggcgccctgcccgtgctcggcgtggccttcgcccagaactacgagaccttcctgttctttcgcctgctgatcggcgcggttggcgccagcttcgtgatcacccagtaccacacgtcggtaatgttcgcaccgaacgtggtgggcaccgccaatgcggcgtccgctggctggggcaacgctggtggcggcgccgcgcaaggtctgatgccgctgctgctggccacgatcctgtttctcggcgtcgatcacacgatgggctggcgcgtggcgctgctggtgcctggcatcctgatgctggtcatggccgtcgtctactggcgcttcacgcaggactgccccgaaggcaacttctccgaactgcgtgcccgtggcatcgccgtcagcggtggcaagggcggtggcggctgggccagcttccgcgccgccagcgccaactaccgcgtctggatgctgttcatcacgtacggcgcctgcttcggcgtggaaatcttcattcacaacgtggccgccacgttctatgtcgatcgcttcggcctgtcgctttcggccgccggcatggccgccgcgagcttcggtctgctggccctgtttgcccgcgcgctgggcggctacgtatcggacaagctggccatgcgtcgcggcctcgacgcccgctccctgatcctgttcgtcttcatcctcggcgagggtctgggcctgctcggtttcgctcacgcctccacggccaccactgcggtagcagcgatgctggttttcgggctgttcacgcacatggcctgcggtgcgacgtacgcgctggtgccgttcatcgatcgcaaggcacttggcggcgttgccggcatcatcggcgccggcggcaatgtgggcgcagtggcggcgggcttcctgatgaagggcctcggcgacctgcagcagaccctgacgtggctcggcgtggccgccacgctggccgccctgtgcgcgattgcggtgcgcttcagtgccgagcacaaggcccaggagcaggcgctctacgacagcgcgctcgccaactga

SEQ ID NO: 90 - DNA, 1377 bp, Planctomyces limnophilus
atgaccacctccgccaaagcgacatcgatccggctgtgggatttcaagaccccacccatgcgtgcgttccacatgtcctggttcgcgttttttctgtgttttttcgcatggttcggcatcgcaccactgatgccagtcgttcgcgatgaaatgcacctcagcaaggatcaggtgggctggtgcattattggatcggtcgcgatcacagttcttgcgcggctctatgtcggctggctttgcgaccggatcggcccccgtctggcatatagcgggctgttggtgctcgcttcaatccctgtgatgggaatcggactggcccacgatttcacgacgtttttaatgttccgcatcgcgatcggtgccatcggtgcgtcgtttgtgatcacgcagtatcacacttcgatcatgtttgcaaagaactgtgttggcacagcaaacgccactactgccggttgggggaatcttgggggcggggtgacgcaaatggtcatgcccacgctctttgcacttctcatggtcgcgttcgggttgtcaacggccagttcttggcgattctgtatgctgctggccggagtggtctgcgctatcacggggatcgcttactttttcctcacgcaggatactccagagggaaactttgcagagcttcgcgctactgggaaaatgtctcaaaagtcggcagtcaagggaacgtttcaagaagcttgtcgcgactaccgcgtctggattctgtttctcgtctatggggcctgtttcgggatggaactgacgctcgacaacatcgcggcactctatttcatcgactatttcgaagagctgaaaacggctgatccagtctacgcgctgggcatcgcagggttcgttgcaggactctttggttcaatgaacctcttcgcccgcgcgctgggcggcatcgcttcagatcggtgtgcggcgaagtgggccctgtcgggccgggtccgctgtctgttcattgtcgtcctgctggaagggatggctcttatgctcttctcgcaggcccgaaccttgcagtttgccattcccgcgatgctgctattaggtctctttgtcaaaatgtcgaatggggcgacttatgcggtcgtgccattcatcaacaagcgggcactcggttcggtctccgggatcgttggagccggtggaaatgcggcggctgtcgcggctggatttcttttcaaaagttcggtggtgtcctggccgacggctctgttcattctcggggtgatcgtgacgctggtatcagtcagcatactagccatccgcttcgcgcctcaaatcgaaagcgaagaggccacgcttccgatcctgacaggagacgaggcggcccccgttttaccagccggtgtccaagctgtgtga

SEQ ID NO: 91 - DNA, 1311 bp, Dyadobacter fermentans
atggaaacgaccaataagccgcttgaaaaactcaacatattcagcttcaagggcgtgcaaatgcgcactttccacctgacctggatggcgttcttcctctgtttcttcggatggttcggactggccccgctcatgacggtcattaaagcggatctaggcctcaccaagccgcaaatcggtaacattatcatcgcctccgtagccgccacggtcatcgcccgcatcgccatcggcaagctgtgcgactcctggggcccgcgtaaaacttacactgcattgctcggtttcggcgccattccggtgatgacagtcggcctggtggactcctatgaaggctttttgctcttccgccttgccatcggcgtgatcggcgcttcatttgtggtgacgcaataccatacttcggtcatgttcgataagaaaattgtcggaacggccaatgcggtggctggcggctggggtaacctcggcggcgggatcacgaacatggtcatgccattggttttcgcagcattcgtgggcgcaggttacctgcccgaatcggcctggcggatcgcgatggtcattccgggtgtagcgttgctgatctttgcatttgtatattatttcttcaccaaagacaccccggctggcaacttcgaagacctggcgatcactaacccgaaagctgccaaaacaaaaggcacattaggcatcgccatgcgcgatccgcgcacctgggccttattcctcgcctatggagcatgttttgggattgaaatcacttttgataatgtggctgcattgtactttttcgacaactttaacacctcgttggaaacggcgggtatcctggctggtgcattcggatttatgaacattttcgcacgggccatcggcggaatcgtggcggataaggttggtaacaaatggggaatgctgggcaaaggacgcctgctcgccctcctgctcgtgctcgaagggatcggcatcgcattgttcgcgcagagcggcagcattgttggcgcggtgattaccatgctttgcttcgcaatgttcttgaaaatggccaacggcgctacttatgcgattgtgccttttattaatcaaaaagcgatcggctcggtgagcggcatcgtaggcgcaggcggtaatgtgggcgcggtgctggcaggattcctgttcaaatccagcgcaatttcctactcggaagcatttatgtacattggggtagccatcgcctgcatcgccgcaatcgtcgcattgatcaactttgaaaaggaacagacggtgacagcggaaacaggccaattggagccggtagaagcataa

SEQ ID NO: 92 - DNA, 1620 bp, Synechococcus sp.
atgatcggagagttgtttacgaaagcaactcagggcaggtacaaaattcttcacctgacttggtttgctttctttttatcgtttgttgtttggtttaatttcccgcccttcgcaacaacgattgttcaagagtttggcttaacgccagcgcaagcaggcaccattggtttgtgtaacgtcgctttaacagttccggcccgaatcataatcggcatgctgcttgataggttcggtcctcgtgttacttacagttgcttactgatctacgcggcaattccatgcttaatttttgcaacagcgactagtttcaaccagctagtggttggtcgtttgctgatggggattgtcggtgctggatttgtgattggtattcggatgaccgcagagtggttcccacccaaagaagtgggtacggctgagggtatctacggcggctggggcaactttggctctgctttctctgccttcactatggtactttttgccatggctttgagctttctacccggttcgtttaacttcggtgaacctcagccttttgttgtgttaggtatgcgctttagcagcgaagtgttgaactggagagctgcgatcgctggttctggtattgtcgctgccctctacggtatcttctactatttcaacgtcaccgatactccccccggcaaagtctacaaaagacctaaaagtgctcgtggtatggaagttaccacagtacgcgacttctggtttttgatggcgatgaacatccctttgactgccattttgatggtattggcgtggcgtttgacaaaggttaacttcttgtcaattccagcaatgtatatcgtctggctttgcctgctaggtctttatgcttttcaggcttacaactgctggagcgtcaacaaagatttgctagctggccgcaaacgctaccccgccgaagatagataccgctttaagcaagttgctctactagagctaacctacatcgttaactttggatctgagctcgcagtcgtctctattctgcctgccttctttgaagggacctttggcctagataaggccactgcaggtattatcgccgctagctacgccttcatgaatctagtatcacgtcctggcggcggcattatctccgactctgttggtagccgcaaatggacaatgactgttctactagcagggatgggggttggctacctcatctttagcatggtgggtagtggctggtctttgacacttgctgtcttgctggtaatggcttgttctttcttcgtacaggccgcagaaggtgctaccttcgcactagttccgctggtcaagcctcggattacaggtcagatcgctggtaacgtcggtgcctacggtaacgtcggtgcagttgcttacttgactaccttgctactgcttaaagaggcgtttgtgcctgctggcgatcaaattgatcctgccctcatagcagcgggtactgcaagagctaatgctgccttcttccaagtgctgggcgttgctggcttagtggttgccttcctatgtgctttcttcctagatgagcctaagaattcttttgccgatgctcacgaaggcgaagaagaaacagtggttgcaccttcttcctcgatgcttagctaa

SEQ ID NO: 93 - DNA, 1542 bp, Synechococcus sp.
atgcttcgcgacctttggtcgttccagggaaggtatcgaaccctccacctcacctggttcgcctttttcctgaccttcgtggtctggttcaacctggcccctcttgctaccaccgttaaagcggatctcggactcacgctgggtcagatccgcaccgtggctatttgcaacgtggccctcaccatcccggctcgcgtgctcatcggcatgctgctcgataaatacgggcctcggctcacctactcagggatcctggtcttttcagccatcccctgcctgctgtttgcgtcggcacaggatttcaaccaattggtggtggctcgtctgctgctctccatcgttggcgccggcttcgtgatcggaatccgcatggtggctgaatggttcccacccaaagagatcggcttagccgagggcatctacggcggctggggcaactttggctccgccttttccgctctcaccatggtggccctcgccggcttcctgtcgttctccggtggatttgaactaccaactggtgcggttttgaactggcgtggagccattgccatcaccggcatcatttctgccgcgtacggcattttctacttcttcaacgtcaccgatacacctccgggcaagacctaccaacgcccttcgagaaccgcaggtttagaagtcacctcgatgcgtgatttctggggattgctgggaatgaatgttcccttcgcagccattctttgcgtgctctgctggcgcctgcaaaaagttggattcctgaatgcgggcacttacccactggccattggcgccgtggctgtttggtttgctttccaaacctggggaattattcgaaccaatcgagaactgattcttggcaccaaggtttatcccaaagaagaccgttatgaattccgccaagttgccattttggagctcacgtacatcgtgaacttcggctccgagctggcggtggtgtccatgctgccgaccttctttgaaacgacattcgatctgccgaaagccacagcaggcatcctggcgtcttgcttcgccttcgtgaacctggtcgcccgtcctgctggaggcctgatctccgacaaagttggtagccggaaaaacacgatgggcttcctcaccgctggattgggagtcggctacttggtgatgagcatgatcaaacccggtaccttcaccggcaccactggaatcgtcatagccgtggcgatcaccatgctcgcgtccttcttcgtgcagtccggcgagggggcaacatttgctctggtcccccttgtcaaacgtcgcatcaccggacaggtggccggactcgtcggtgcctacggcaacgttggtgccgtgacttacctcacgattttcagccttctgccgatgtggatgggcggtggcggagaaccaactcccgaggtgatcgctgcttccaacagcgccttcttccagatcctgggtgtagctggtctgatcgtcgccttcttctgcttcttcttcctcaaggaacccaaaggttccttcgatgagttgcatgaaggcgaagtggcctaa

SEQ ID NO: 94 - DNA, 1503 bp, Nostoc punctiforme
atgcttaaaaaattattttcattcagcgatcgctaccgcatcttacatcagacttggtttgctttctttctcacctttgtctgttggtttaactttgctcccttcgctacaaccattggcaaagaactacatttagcccctgagcaaatcaaaaccttgggcatctgtaacctcgctctcacaattcccgcccggttaatcattgggatgcttctagatcgttttggtcctagaatcacctactcaatcttgctgatgtttgcagtagttccttgtttagcaacagccctagcgcaagactttaatcaattagtcatcagtcgtttgctgatgggaattgtcgggtctgggtttgttgtcggtatccgcatggtggcagaatggttccagccaaaggagatgggaattgctcagggcatttatggcggttggggcaacttcggagcttttggcgcagagtttgccttaccgatacttgcaatttctactagctttttctctggtggtgcttctaactggcgattagcgatcgcacttgtaggcatcataactgctatttatggcgtaatttactacaacactgtccaagatacgcctagaggcaaagtctacaagaaacctaaaaagaatggttccctagaagtgactagcatcaaaagcttctgggcgatgatgatctcaaattttggtttgattttcgccttgggtttattagcttggcgcttagaacaaaagaaaattcacttcctaactctgagtcaaatgtatttgacttggttggtattagcaggattgtttgcttaccaaagttataaagcttggcaggtaaaccgagaacttctcactggcaagaaaacttaccctgtatctgaacgctttcaatttggacaagtagctttactcgaattcacttacataaccaactttggcagcgaactggcagccgtttctatgctcccggcattttttgagaaaacctttggtttagagcatgttgtcgctgggatgattgctgccacctatcccttcttaaatttggtttctcgtcctagtggtggtttaatttctgataaatttggttcgcgtaagtggacgatgaccattatcagcgttggtatcggtgttagttatttgatggcacattttattaatagtaactggccgattccagtagcgatcgcagttacaatgtttgccgcttattttgctcaagctggttgcggtgcaacctacagcatcgtacccatgattaaaaaggaagccactggacaaattgcgggcaatgtcggagcttacggtaattttggcggcgtagtttacctaacaatttttagcttaaccgacgctcccacactatttagcacaatgggtatagctgcactaatctgtgcttttatgtgtgccttcttcctcaaagaaccaaaaggttcctttgctccagcctacgaaggtgaagcatcagaaactgcaactaaaagctctgttttcttaactgaagaatag

SEQ ID NO: 95 - DNA, 1506 bp, Synechococcus sp.
atgtttcgaagattgttgtcgtttagcggccgataccgcatcctacacctgacgtggtttgccttcctcttatcttttgtcgttatttttaacgcggccccactagctgaatcgatcatagaagaattccagctgaccgagctgcaatttcggacgatgctcctatgcaatttagctctggcgattccatttcgagttatcttcggcatgctgatagaccgcatcggtcctcgcatcgttttttcaggcgtcttgatttattctgccattccctgcatcgcgtttgcctttgctcaggactacaaccagttgctttggagccgtttagcgattggcgtggttgcagcgggatttgtcgtcggcattcgcatggtagcgaactggtttcctcccgccgaaattggctttgcagaaggaatctatggtggctggggtaactttggctctggtgtggctgcgatcgccctacctctagtcgccactggagcaagttttttcgtgggtggtcagagcagctggcgatatacggtcgcccttagcggcatcgttgcagccgcttatggcgtgttttatttcttcaacgttcaagatacaccacccgataaggaatttaagtcagccaaacacccaggcgcaatcgaagtgaccagccaaaaagacttttggctgatgacaatgtcgaatttccccctatatgttgctttaggcgttgtcgcctggcgatttaacgtagttgaagcgctcagtgctacagcagtcgtcattatctgtgtagcgctatttggcttatacctattccaaacctactggaactggaaagtcaatcgacaattaatggcgggtcagaagcactatgcccccgaagagcgctacgatttcacccaggtagttctgttgaatctgacctattttgtctgctttggctcagaactagcggttgtttcgatgataccgctgttttacctaacaacctttagcttaccggttgcagtagcaggagcagtggcttctagctatgcctttatgaacttagttgcccgtccggggggtgggttaatctctgataccatcggcagtcgaaaatggacattggtgatattgcaggctgttacaggagttggctacctaacaatgggcttaatcaacgtcggttggctgcttcccctggcaattggcgtcacgatgtttgcctctttctcggttcaggcggcggagggcgcaacctatgcaattgtccccctagttaaagaggaaattaccggccaaatcgctggcagcgttggagcttggggaaatgtggggggagtggcttttctacttctgttcagtctattgccgacaggagatgtcggtaacaagatcttcttctcgacgatgggaatcagtagtttgattatgttcttcctactttggtttttcctcaaggaacccaccggtactcatggtgaggaagcattagaactgcaaccgtcagcagtctctggcaaattgactaaccggcaatga

SEQ ID NO: 96 - DNA, 1647 bp, Roseobacter denitrificans
atgaaaatctcaactctgttccgggttcaggaccgcgccattcgcgcgctgcacctgacctggatcgctttctttattaccttttatgtctggttcaacatggccccgctggcatcttcgatgttggcggcaaatgattggcttaccaaggatgacatcaagctcttcgccatcgcaaacgtggcgttgacgatcccggcccggatccttgttgggctggcgctcgacaaatacggcccgcgccgtgtgttctcgatcctcatggtcgtgatggccgtgccgacgctcttcttcgcctttggcgacaccaagatgcagctctttgtctcgcgtctgatcatgtcgtctgtcggcgcaggtttcgttgtcggtattcacatgacagccctttggttcaagccgcgtgacatcggctttgccgaagggttctacgcgggctggggcaacttcggttccgctgctgcggctctgaccattccgacaatcgctctgaacatgttcggtggcgatgatggctggcgctacgcgattgccatgtcgggcatcatcatggcggcctatggcgtgttctactggttcgcgatcactgacggtccgaaccccgacacccacaagaaggcaaagggttcagcacttgaggtttcgacctacaaggatctggtgctgctggtcatcttcaccgtgccgctgatcgggattttgtcgatcctcatctaccgtgtgcagatgatgggttatatcgatggcttcgttgcaaccatctgctacgcctcgattgcaaccctggttgtctatcaggtctggcaagtgctgcgcaccaacctgccgatccttcgcaaaggtgttcccgaggatgacaagtatcccttcagctcggtcgcagcgctcaacaccacctatttcgcgaacttcggtgcggaactggcggtcgtgtcgatgctgccgatgttctttcaggaaacctgggggctgacagcagtcgtcgctggtctgatcgcggcctcctttgccttcatcaacctcgtggcgcgtccgatgggcggtttggtctcagaccgcatgggcaaccgccgctttgtgatgctggcctatatgctggggattgccatcggttttgcgctcatgggcctgttgaacagcgaatggcctctgatcatcgcgatcgccatcacaatcgcttgctcgttcttcgtgcagggggcggagggggcaaccttcggcatcatcccctcgatcaagcgtcgggtgaccggacagattgccggcatggccggggcctacggcaacgttggcgcggtgttctacctcttcatcttcacctttgtcgacacgcagaccttcttcttcatcatcgcctgtggtgcgctgatctcctgggttgtctgcttcttctggctgaaggaaccggaaggtggctttggggaagagtacgtcctcagttctgttgaccaggccatcgcagcggaagccacgcgcaagaaagaggccgaagctgaactcgccttgatctttgagggctccgagaaggtggcactcgccgagaaaggcaacggcctgaccgtcaccgcaaggttcaaggaccttgacgatctcaagaccgctttggcccgactaggtccaaacggcagccagcaaccggctgaatga

SEQ ID NO: 97 - DNA, 1515 bp, Bacillus cellulosilyticus
atgaaaatagctgatatttttaagtttaagaatgaacaaatgaaagtgttgcatttaacgtggattgccttttttatatcgttctttacttggtttaatatggcaccactagcaacgacgatgcttgaatctagtgattggttaacttctgagcacattgctgcacttgccattattaacgtcgccttaacgatacctgcaagaatcgtgataggaatgctaatcgatcgctttggtccaagagttgtttactcgggattactgattttaatgtcaataccaacgtttatgtttgcatttggagactcatggacacagttaatgatttcaagattgttattaagtagtatcggtgcaagctttgttatcggtattcggatggtttcagaatggttcccaccaaaggatgttggatttgcagaaggtgtttatggaggatgggggaactttggttcggcagctggagcgatgctgttaccttggtttgcattaacagcctttggcggtgacgaaggttggagatatgcggtcgccttaacaggagtattttgtatcgtgtatggaattatttatttccttgctgtaagagatactccagaagggaaagccttcgttgtacctaagaaaaatggtgcaatggaagtaagtacatggaaggatatgattcagcttattctttggacactgccgttaggaggcgcgttagctgtactcgcttggcgtttagagggaatgggattcatctcttcgacagttttatattctacttacgcaattataggtgcagtaatgctctatcaaatatacaaaatattacaagtgaatgttcctattttaaaaaagggtgtaccgaaggacgaccaatataaatttaagaatgttgcagcactaaacagcacatatttcgcaaactttggtgcagagcttgctattgtctcgatgcttccgatgtttttccagatgacattttcattaagtgcaacatcagctgggctaatagccgcatcgtttgcgtttattaatttaatcgctagaccattaggaggaattttatccgatcgaatgggaaatcgaaagcgtgtcatgcttatttacatggttggaatcaccttagggatggtaggcatgggctttatcaattctggctggccactcgtcctagcagttgcaattaccgttttaacatctgtattcgttcaaggatcagaaggagcaacctttgccattataccgatgattaaaaagcgaatcactggtcaagttgcaggtatggcaggggcatatggaaatgtagggtcaacaatttacttaacgctatatacatttgtcacaccgcaacaatttttcttcatattagctggtggtgcatttactagcttcgtgctttgctacttctggctagaggagcctaaaaactcatttgcaaatgagtattatgaatcatctgtagacagagaaaatgcagtagaagatcattatgaaatggaattgaaaaaagtagcagtaaacaaataa

SEQ ID NO: 98 - DNA, 1476 bp, Shewanella woodyi
atgtcaaacgaaggaaaaatgaatctgctcaattttgcagatccaaaaataaaaatgcttcatgtaacatggttcgcttttttcttgtcttttgtcgtctggtttagtcacgcccccttgatggtatttattaaagaagcgtttgacctaacgagcgcgcaggtaaaagccttactcatcttaaacgttgcgcttaccatacctgctcgcattgtgatcgggatcttagttgataaatatggccccagaattatttacagtagtttgcttatcatctcttcatttatctgtctcggctttgctatggcccaaagctttgagcaactagccctattcaggtttctcttaggctttgtgggcgcaggcttcgtgattggaattcgactcgttggtgagtggttcccagcaaaacaggtcggcattgccgaagggatctatggcggctggggaaacttcggctctgccgctgcggcaatgtcactgccaacgttagcttatgcatttggtggtgatgatggatggcgctacgccttagcgtgcactgggattttagcgggtctatacggcatattcttctacattgcagcccgaaatacgccaaaaggctccacctactttaagccaaaaaagtctggtggtttggaggtcacaagttggaaagacttctacttttatctgtttatgaatatccccatgtatatcgccctcgccgtgctggcttggaaattatcacctacaggggtgaacctgtttaccactgaaaccatgtacatcatgtggttgtcactcttagtgttattttttattcaggttaactctatctggcgagtcaataaggagaacctgacccatggcgttcctaacattgagaagtatgagtttaaacaagttgctattctcgatgtcgcctactttgttaccttcggctcagagcttgcggtagtctccatgctacctctgtttttcttagaaacatttgacgggctagatccagtaaaagcaggtttattggcctcaggctttgcctttatgaacttggtcgctcgccctactggtggctggtttagtgataagtttggacgacgtaagagcttgatgatcttagtcggtggcttagcagctggttatgccatactcagtcaagtcgatggcagctggtttatcccccttgcggtcatggcaaccatggtctgctcctttttcgttcaagcaggcgaaggtgctgtttttgccatagtgccactggtcaagcgtcgcatgacaggccagattgctggtatggcaggtgcctacggcaatgttggtgcggtaacctacctaacggttttatcttttgtggattacagcaccttcttcttggtcatatcaggctcagctctgtttatctttattgcaactatgttcctcaatgaacctaagggacatatggcagaggtgaacgaagatggcacggtagaacttattgatgtgaattaa

SEQ ID NO: 99 - DNA, 1470 bp, Alcanivorax sp.
atgagcgccgacaagctgaacctgctgaatttttccgcgccacgcatccggctgttgcacctgagctggctcgctttctttattacctttgtagtgtggttctcccacgcgcccttaatgggccacctgcgcgaagccttcgatctaagtgcagaacagatcaaggcgctgttgattcttaacgtggcattgacgattcctgcccgcgtcgtgattggttcgctggtggatcgctttggcccacggcgggtgttcggcctgttgctgatactcgccgcgtttccctgctgggcctttgccctgtcgaccacctttgaacagctggcagtcacccgcctgctgatgggttttgtgggggctggcttcgtggtcggcatccgcctgatcagtgaatggtttccggcccgggaagtgggcctggccgaaggtatctatggcggctggggcaacttcggctctgccgctgcggccattacgcttcctaccgtggcgctgctgttcggcggtgacaatggctggcgcttggcaattgccagcaccggtgcactggcgatggcttacggtgttttcttcctgtggcgggctcgcaacaccccggcgggcgcctcctatttcaaaccaaaaaaagccagtgcactggaagtcagcagccgcaaggacctgtttttctacctgctgatgagcctgccgctgtatatcgcgctgctggtgattgtatggcgcctgggccccagtaatctggatctgttcggtaccaccacgcaaatcatgctggccgcgctgatcgtcagcctggcagtcgtgcagctggggcaggcctggcgcgttaaccatgaacgcctgaaaaccggcgtcgaggaacacgaccgctacagcttcaagcaagtggccattcttgatctggcctacatggtgacctttggttcagaactggccgtggtctccatgctgccgctgttcttcaccgacaccttcagcctgtctgcagtgaccgccggcctgctcgcgtctggctacgcctttatgaacctggtcgcacggccgggcggcggctgggtctctgacaagtttggccgcaagaaatccctggcgatcatgctgtgtggcctgatggtgggctacggaatgatgagccagattgctggcagctggcccatcgcgctggccgtgatcgccaccatgtgttgctcgttcttcgtgcaggccggtgaaggcgccgtgttcgccaccgtgccactgatcaaacgccggctcaccggacagattgccggcatggtcggcgcctacggcaatgccggtgcggtgatcttcctgaccgtgctcacgttcgtcgatccgtccacgttcttcctggtgattgccgccagcgcggcagtgtctctggccgcggttcagttcctggacgaacccaagggtcacattgcggaaattgatgacgacggcaatgttcagctgattgaggtgggataa

SEQ ID NO: 100 - DNA, 1404 bp, Alcanivorax sp.
gtggcgttctttatcagtttcgccctgtggttttcccacgcccccttaatggggcacctgcgcgacgtcttcgacctgaccggcgaacaggttaaggcactactgattctgaacgtggccctgacgattccggcacgcgtggtgatcggctccctggtggaccagtttggcccgcggcgggttttctccaccctactgatgagtgcggccctgccctgttgggcctttgccttgtccaacagcttcgagcagctggcgatcagccgcttgctactgggttttgtgggcgccagtttcgtggtcggcattcgcctgatcagtgaatggtttcccgcccgggaggtgggcctggctgaaggtatttatgccggctgggggaacttcggtgcctttgcctcttacgtcacacttcccaccctggccctgttttttggtggcgaagacggttggcgctgggcggtggccagcaccggctttatctccttcctgtacgggctgttctttatgtggcgcgcgcgcaatacccccgccggcgcgtcctatttcaaaccgaaaaaagccagtgcgctggaagtcagcaaccggcgtgacctgttcttctatattggcgccagcctgccgttgtacatcgcgttgtacattattgtgtggcggctgggcccggcaggattccgcttgtacgacaacagcacccaggccattttcatcgtcgctgtcagtttgctggccgccattcagttatcacagatatggcaggtcaatcgcgaacgctggcagcaaagcgccccggaacaggacagctatcccttcaagcaggtggccattctcaacctgtcctacttcattacgttcggctcggaactggcagtgaattccatgctgccgttgttcttcctcgacacgttcagcgaagtcactccggttaccgccggattgctggcgtccgcctttgccttcaccaatttagtggcgcgccccggtggcggctggctttctgaccgcattggccgcaagaaatccctgactattctgttttgcggtttgttaatgggttttgtgctgctcagccagatcaacagcggctggcctgtgcttctcgccatggcggccaccatggtctgttcctgctttattcagggcggcggcggtgccattttcgccactgtgccgctgatcaaacgccgccttaccgggcagatttccggcatggtcggcgcctacggcaacgccggcgccgtggtctttctcaccgccctgacgtttgtggatgccagtaccttcttcctggtaatcgccgcctgtgccaccgccgtactggttgccgtccagtttctggacgaacccaaggggcacattgcagaggtggatgaagatggccgcgttcaattaatcgaagtgagctga

SEQ ID NO: 101 - DNA, 1476 bp, Shewanella denitrificans
atgagtcttgaaagccgctttaacctgttttcattcagcggaaaaatgaaggtgctgcacttaagctggatggcattttttatcacctttgcagtgtggtttaactttgctcccatgctgcagtccgttaaagaaagcctagggttaacttcagagcaaattaaaactttattgatcctcaacgtggccttcacgattcctgcaagggttgtggttggcatgcttaccgacaggttcggccctcgattagtgtattcggcgttattagctatctgcgccttgccgtgtttcgcctttgcccttgcggatacctttgttcaagcggctattgccagattcttactgggctttattggtgcaggttttgtagtaggcattcgcttggtgtctgagtggtttccccataacgaactgggcacggctgaaggtatttatggtggttggggtaattttggctcggcggctgcggctttttgtttacctgccttggcgctagcctttggtggcgatgatggctggcgctatgccacaggcataactggcttgatgagcttaggctttgctctggtgttttattttaacgtcgaagatacccccaagggggcaacctactttaaacctaaaagccttaaggccatggaggtgacttctaaaggcgacttcttgttactacttgtgatgaaactacctttgtacggcgccttggcattgctggcttggaagctgtcaccgactggggttgcgatgctcagtgacaccgctgttattagtgtgtacctaggattagccttgctgtattgctacgaagtgctgcaagtatggcaagtaaacaagattatttttactgagccagtggctgcaatccatcaatacaagtttaagcaggtggcggtattgaacgtactctactttgcgacttttggatctgagctggcagtggtgtccatgttgccgttattttttgctgaaaccttcgagttaaccccagttgttgcgggcatggtggcgtcggcttatgcctttatgaacttgatgtcacgcccaggtggcggctggatctcagataaatttggccgtaaaccgacactgttaatcctcaccgctggccttgctgctgggtactttctcatggggcaagtcaacagtgattggcctttgtgggttgccgttgctgcagcgatggcgtgctccttctttgtgcaatccggtgagggcgcggtgtttgcgactgtgcccttaattaagcgccgcatgacagggcaaattgctggcatgaccggagcctatggcaatgtgggcgccgtgtgttacttaactgtgctgtcttttgtggattacagcagctttttctacgtgatagcggcaacggcggtgctgggattttgcgtgctgtggtttatggaggagccgcaagggcaaatggcagaagtgaaccacgatggcagcgtgaccttaatcgatgtctcgagtcgttag

SEQ ID NO: 102 - DNA, 1467 bp, Shewanella woodyi
atgaaggcggaaaaatttaacctattctcattttcaggcaagatgaagatgatgcatatgagctggatggcattctttatctcatttgttgtttggtttaacgcagctccgttaatgagcgtcattgccgacagcctaggactgagtaaagagcagataaaaaccctgcttattcttaatgtcgctctcaccatccctgcacggattattattggcatggtgacggataagtttggtccaaggttaacctattccgccttacttattgtgtgctcaatcccctgttttatgtttgccttaggaaccagttttgagcagcttgctttagctcgctttcttcttggctttattggtgcgggttttgttattggaatacgtatggtcagtgagtggtttcccgctaatgagcttggtaccgcagaggggatctatggcggctggggcaactttggttctgccgctgcagcttttaccttgcctgcgattgcccttgtgtttggcggtgaggatggttggcgctatgccattggtgctacagggggactgagtttactctttggtgttatctactttcttaatgtgagcgatacacctaaaggttcaacctattttaagcctaaaaaagcgggtgcattagaggtgacaagtaaagctgatctggtgttactcgttgtgatgaagttgcctatgtatgccacattagcactcttggcctggaagttgtcccccgagggcgtcaagatgttcagccaaagtagtactgagttgatctatgggctgttaatactcgttctggctatcgatctttatcttacctatcaagttaataaacatctgttcgatgggccagtacctgagtttgagcgatatccttttaaacaggtagcagtgctcaatgtgctctatttttccacgtttggctcggagctggcagttgtttctatgttacctctcttttttgcagaaaccttcgagctgggcttagcccaagcggggatgttggcatcgagttatgcgtttatgaacctgctgtctcgtcctggaggaggctggataagtgatagatttggaagaaagccaaccttaatgatcttaaccgctggtttagctttaggttatcttgggatggcacagataaacgatcagtggtctctgcctttggctgtgttaatggtgatgacctgctccttctttgtccaaggtggtgaaggcgccgtatttgctgctgttcccttgattaaacgtaggctaaccggccaaattgctggtatgacaggggcttacggcaatgtaggggcggtatttttcctgacggtttactccatggtgtcgacccagctgtttttttatgtcattggcgcgagtgcgctatttggcttggttagcttgttgtttctcactgaacctaaaggtcatatgactgaggtgaatgaggatggtgaagtgaccatgataagtgttaactaa

SEQ ID NO: 103 - DNA, 1389 bp, Escherichia coli
atggcactgcaaaatgagaaaaatagtcgttatcttttgcgcgactggaaaccagaaaatccggccttctgggaaaataaaggaaaacatattgctcgaagaaatctctggatatcagtcagttgtctacttcttgccttctgtgtctggatgctatttagcgcagttaccgttaatctcaataaaatcggttttaattttactaccgatcaactctttttattaaccgcattaccctccgtttctggcgcattattgcgtgttccctactcctttatggtgcctatattcggtggacgccgatggacggtttttagtactgcaatcctgattattccttgcgtctggctcggaattgccgtgcaaaatccgaatactccttttgggatatttatcgttatcgctttgctatgcggttttgcaggtgcaaactttgcttcgagcatgggcaatatcagtttcttctttccaaaagccaaacaagggagcgctcttgggattaatggcggattaggaaacttaggtgtaagtgtaatgcagctggttgcaccgctggtcatttttgtacctgtatttgcctttctcggcgtcaatggcgtaccgcaggccgacggttcggtgatgtcgctggcgaatgccgcatggatttgggtaccgctactggcgattgccacgatcgccgcatggtcagggatgaatgatatcgccagttcacgcgcctcaattgccgaccagctccctgtcttacaacgcctgcatctctggctgctgagcctgctttaccttgccaccttcggttcgtttatcggtttttctgcgggttttgccatgctggcaaaaacccagttcccggatgtgaatattctgcgcctggcgttctttggcccatttatcggtgccatcgcgcggtcggttggtggtgctatttccgataagttcggcggcgtgcgggtgacgttgatcaactttatttttatggcgattttcagtgccctgctgttccttaccttaccgggcacaggctccggtaatttcatcgccttttacgccgtatttatggggctgtttctgactgcgggtctgggaagtggttctactttccagatgatcgccgtcatctttcgccagataaccatttatcgggtaaagatgaaaggcggtagtgatgagcaagctcataaagaagccgtcaccgaaacggcggcggctctgggctttatctcagccattggcgcagtgggcggcttttttattccgcaggcgtttggcatgtcgctcaatatgaccggctctccggtcggcgcgatgaaagtgtttttaatcttctacatcgtttgtgtgctgctgacctggctggtttatggtcggcggaagttcagccaaaaataa

SEQ ID NO: 104 - DNA, 1509 bp, Escherichia coli
atgacttttgctgcacacaacgccatgagcatcgcaccattcaaattattttccctccacggcaaaaccaagatcttgcatctgaattggctggcctttttcatcagtttcgtgatttggttcaatcacgcgcccttattgatgttgattcagcaagacctgcagatcagcgacgccgatatcgaaatcatcttgttgctgaatgtggcgctggcgataccggcgcgggttgtcactggattgctggtcgaccgtttcggtgcccgcatcagctacagcgtactgttggccgtttgcagcctgccgtgtttcatgttcgccatggccgatgattttgccgaactggcctggtcgcgatttttgttgggcttcataggcgccagtttcgtcgtcggcgtgcgcatcatcggcgactggtttccgtccagtcaaatgggttttgccgaaggcatctatgccggctggggtaactttggctcggcggcagcggcgattgccttgcccggcttggcgttgtatttgggcgaggaaaacggctggcgctatgccgtcgccgtcaccggttgtctggctttgctgttttcgctggtgtattaccgcaacgtggaaaatctaccgccggaactggccggcttgcaggtcaggcacgccaacagcatggaggttgccagcgtgcaggatttgttcttgtacatgctcagcctgctgccactgtatatcagcctgtcgctgctgacctggaaattgtcggcattacccgagcctttattgagcacggcttgggccttcgccttgcatgcgggtatttggctattgtttttttggcacgcccataaactggttggcaccaatgcggcgcgcttgagtcagcccgtccccgagattcatcaataccgttacaaacaagttttcatcctggcgctctgttatttgatgacgttcggttccaaattggcagtgctatcgatgctgccgatgtttttcttcaacaccttcaaggacagtcaccagatcggcatgctggacgcgggcttgctggcttccagcttcgtcatcaccaacatcattgcccgtccggccggtggctggttgagcgaccgtatcggccgccgcttatccattctgctgtttaccgccggcctggcattgggttatttattgatggcgcaaatttccacagactggcccatttcatgggcggtgctggtgacgctgttctgcgccgtgttcatgcaggccgccgaaggggccatttttgcattcgtgccgctgatccgccgcgcgatcactggcgaagtggccggcatcgtcggcgcctacggcaatgccggtgccatcatctttttgatcgcgctgacgttcctgacgccgaccagttttttcctggtactcggtgccggctgtctgttgtcgctggggctgatcatgcgtctggaagaacctggaaatttcatgaaccagatcctccccgacggaacgatcatcaaaatcgagctggaaagcgaatga

SEQ ID NO: 105 - protein, 455 aa, Singulisphaera acidiphila
MRQDGKATRINLFDVTTPSMRAFHLSWIAFFLCFFAWFGIAPQMAAVRSEMGLTKDQIGWLIIGSVAITVVSRIVCGELCDRFGPRLTYTWLLILGSLPVMGIGLSHDFKTFLAFRVAIGAIGAGFVITQYHTSVMFAPNCIGTANATTAGWGNMGGGVTQFAMPLLAAFFAATLGLGDYWGWRASMLVAGLVCLLTGVAYYFLTQDTPHGNFSELRASGRMAPAGASKGTFLRTARDPRVWVLFVMYAACFGVELTMDGVAHLYYHDHFGLSAKAAGFAAGSLGLLHIFARTLGGYISDRLGGRWGLKGRVHWLFVALLLEGLGLMLFSRMPTVALALPAMIGFGLFMKMSEGATYAVVPFVNKKALGSVSGIVGAGGNVGAVAAGFMFKGAIAWPTALFILGATVSVASFLAFAIRFSLETETEAARECAEAEDQRRQLAEAKPQPSLAGAVA

SEQ ID NO: 106 - protein, 459 aa, Planctomyces maris
MEIQNKATRINLFNFTTPQMRAFHMSWFAFFLCFFAWFGIAPLMKIVREEMHLTQEQVGWCIIGSVAITVIARLFIGWLCDQIGPRLAYTWLLVLGSLPVMGIGFAHDYTTFLIFRIAIGAIGASFVITQYHTSIMFAPNCVGTANATSAGWGNLGGGVTQIVMPLIFTMFIGVLGFSESMGWRASMFAAGLVCALTGIAYYFLTQDAPEGNFKELREAGKLPEKKMQKGMFWNACKDHRVWALFVIYGACFGIELTINNIAALYFLDYFDYFKKMETAEAIKMAGLFAGMFGLMNIFARTLGGAFGDRFGQKWGLSGRVKWLFVVIFCEGIALMVFSQMSVLAMALPALIVFSLFVQMSEGATYSVVPFINKKALGAVSGIVGAGGNAGAVSAGFLFKTQAINWPTALFILGAIVTSCAFLTFLVRFTEETEEEARLAHDSAITLKTGEKELAASLGQ

SEQ ID NO: 107 - protein, 455 aa, Burkholderia sp.
MKNVMHSLRSGDWRALVACFLYFDTGFTVWVLYGPLAPFISKSITMTPAQQGLLVAVPVLSAAILRVTLGNLYQSAHGKRIALMGVLLSAVPTIVLPLLQSVPSYEMLLVLGVFLGVGGASFAVALPMAGSNYPPKVQGLVLGLAAAGNIGAVLDGFLFPQLATRYGWQLAAGGALPLLAIAAITLYFWANDAGVKTGSVLRAFGSFATTLAGLIVLVLLVEAGLFGAGKTGVLLLPVIGALLAIAVLPQRYRSVLAERDTWVIMLVYSITFGGFVGMSSYVSLLLTNLYQLSKIDAGLFMALLAATGAMVRPLGGLIADRVSGVRALTVLLAIIAICDFLFATAMPSFAGGIALLLCMYVAFGLGNGATFQLVPHRWAGRTGLMSGIVGAAGGIGGFYLPVVMGIAKESTGSYQMGFATFGTLSACAFLAIVALRRPWMAWSMQTGVMHAHATE

SEQ ID NO: 108 - protein, 455 aa, Burkholderia sp.
MKNVMSSLKSGDWRALVACFLYFDTGFTVWVLYGPLAPFISKSISMTPAQQGLLVAVPVLSAAILRVTLGNLYQSAHGKRIALLGVLLSAVPTIVLPVLPFVPSYTLLLVLGVFLGVGGASFAVALPMAGSNYPPKVQGLVLGLAAAGNIGAVLDGFLFPQLATHYGWQMATGGALPLLAIAAITLYFWANDSGVKTGSVLRAFGSFVVTLVGLIVLVLLVEAGIFGAGKTGVLLLPVIGALLAIAVLPKRYRAVLAERDTWVIMLVYSITFGGFVGMSSYVSLLLTNLYQLSKIDAGLFMALLAATGALVRPLGGLIADKVSGVRALTVLLATISLADFVFAALMPTLAGGIALLVCLYVAFGLGNGATFQLVPHRWAGRTGLMSGIVGAAGGIGGFYLPVVMGIAKESTGSYQMGFATFGALAACAFLAIVALRRPWMAWSLQSAALHAHATE

SEQ ID NO: 109 - protein, 455 aa, Burkholderia phytofirmans
MKNVMSSLKSGDWRALVACFLYFDTGFTVWVLYGPLAPFISKSIAMTPAQQGLLVAVPVLSAAILRVTLGNLYQSAHGKRIALMGVLLSAVPTIVLPLMPSVPSYTVLLVLGVFLGVGGASFAVALPMAGSNYPPKVQGLVLGLAAAGNIGAVLDGFLFPQLATHYGWQMAAGGALPLLAIAAITLYFWANDSGVKTGSVLRAFGSFAVTLVGLIVLVLLVEAGMFGSGKTGVLLLPVIGALLAIAVLPKRYRAVLAERDTWAIMLVYSITFGGFVGMSSYVTLLLTNLYQLSKIDAGLFMALLAATGAMVRPLGGLIADKVSGVRALTFLLAVISLCDFVFAAAMPAMAGGIALLLCLYVAFGLGNGATFQLVPHRWAGRTGLMSGIVGAAGGIGGFYLPVVMGIAKESTGSYQMGFATFGALAACAFVAIVALRRPWMAWSMHTGVMHAHATE

SEQ ID NO: 110 - protein, 462 aa, Burkholderia sp.
MSNLIASLKSGNWRSLLACFLYFDTGFTVWVLFGPLAPFIGRDVTMSAAQQGFLVAVPVLAAAILRVTLGNLYQSTDGRRVALMGVLLSSIPSIVLPLMPGVPSYAVLLVLGVFLGMGGASFAVALPMAGSNYPPKVQGLVLGLAAAGNIGAVLDGFLFPHLADAFGWQMSTAAALPLLAITGVALFAWASDAGVKTGSTMRALSSFAVTLVSLIVLVLAVNAGVFGGGKAGVLLLPVIGALIAIAVLPRHYRSVLGERDTWVIMLIYSITFGGFVGMSSYVTLLLTSLYQMPKLEAGLFMSLLAFLGAIVRPFGGYVADRVTGVRALLVLLAAIAIGDFAFAIWMPPVAGGLAILICLYIAFGLGNGSTFQLVPHRWKGKTGLLSGIVGAAGGIGGFYLPVIMGIAKESTGSYQMGFATFGVLATCAFGALFALRGQWLRWSSTASQSHDGVAIGGAHAME

SEQ ID NO: 111 - protein, 462 aa, Burkholderia sp.
MSNLIASLKSGNWRSLLACFLYFDTGFTVWVLYGPLAPFIGRDVTMSAAQQGFLVAVPVLAAAILRVTLGNLYQSADGRRVALTGVALSSIPSIVLPLMSGAPSYSLLLVLGVFLGMGGASFAVALPMAGSNYPPKVQGLVLGLAAAGNIGAVLDGFLFPHLADAFGWRMSTAAALPLLAITAVALYAWAADAGEKTGSTMRALSSFAVTLFSLIVLVLAVHGGVFGGGRAGVLLLPVIGALIAIAVLPRRYRSVLRERDTWVVMLIYSITFGGFVGMSSYVTLLLTSLYQMPKLEAGLFMSLLAFLGAIVRPFGGYVADRVTGVRALLVLLAAIAAGDFAFAIFMPPVAGGLAILVCLYIAFGLGNGSTFQLVPHRWKGKTGLLSGIVGAAGGIGGFYLPVIMGIAKESTGSYQMGFATFGVLATCAFGALFVLRGQWLRWSSTSSHSHDGVAIGGAHAME

SEQ ID NO: 112 - protein, 464 aa, Burkholderia thailandensis
MKLAEQRTGSSPHFHHPPSTGIREASPMDTLRTSLRSGNWRSLLACFLYFDTGFTVWVLYGPLAPFIGKDITMTAAQQGFLVAVPVLAAAILRVTLGNLYQSADGRRISLMGVLLSALPAVVLPFVPGTPSYTLLLVLGVFLGIGGASFAVALPMAGSSYPPKVQGLVLGLAAAGNIGAVLDGFMFPHIAAALGWKFSTAAALPLLAIAGFALFAWADDRGEKSGNAKRAFGAFVLTLVGLVALVLAVHAGVFGAGKTGVLLLPVMGALLAIAVLPGRYRAVLAERDTWVIMLIYSITFGGFVGMSSYVTLLLTTLYQMPKIEAGLFMSLLAFLGAIVRPFGGHLADRITGVRALMVILAAIAAADFAFAAVMPPLAGGIALLVCLYVAFGLGNGSTFQLVPHRWKGKTGLLSGIVGAAGGIGGFYLPVVMGIAKESTGSYQLGFATFGALSTCALAALVMLRA

SEQ ID NO: 113 - protein, 428 aa, Burkholderia pseudomallei
MDTLRTSLRSGNWRSLLACFLYFDTGFTVWVLYGPLAPFISKDIAMTAAQQGFLVAVPVLAAAILRVTLGNLYQSADGRRIALMGVLLSALPAAVLPFVPGTPSYTLLLVLGVFLGIGGASFAVALPMAGSSYPPKVQGLVLGLAAAGNIGAVLDGFMFPHIAAALDWKFSTAAALPLLAIAGFALFAWADDRAEKSGSAARAFGAFVITLGGLVALVLAVHAGLFGAGKAGVLLLPVMGALLAIAVLPGRYRAVLAERDTWVIMLIYSITFGGFVGMSSYVTLLLTTLYQMPKIEAGLFMSLLAFLGAIVRPFGGHLADRITGVRALMAILAAIAAADFAFAAVMPPLAGGIALLVCLYVAFGLGNGSTFQLVPHRWQGKTGLLSGIVGAAGGIGGFYLPVVMGIAKESTGSYQLGFATFGALATCA

SEQ ID NO: 114 - protein, 466 aa, Burkholderia cepacia
MTRLRTSLQSGNWRSLLACFLYFDTGFTVWVLYGPLAPFIGKDIAMSAAQQGFLVAVPVLAAAILRVTLGNLYQSANGRTIALMGVVLSALPAIVLPCVPGTPSYALLLVLGVFLGMGGASFAVALPMAGSSYPPKVQGLVLGLAAAGNIGAVLDGFMFPHIAAAVGWKLSTAAALPLLAIAGFAIIAWADDRGEKSGSVPRALGAFAITLAGLVALVLAVHGGLFGAGKTGVLLLPVMGALLAIAILPARYRAVLAERDTWVIMLIYSITFGGFVGMSSYVTLLLTSLYQMPKIDAGLFMSLLAFLGAIVRPLGGFIADRVTGVRTLIVLLAAIAVADFAFAAWMPPLAGGIALLICLYVAFGLGNGATFQLVPHRWQGKTGLLSGIVGAAGGIGGFYLPVVMGIAKESTGSYQLGFVTFGALAACACGALVLLRAQWLGWAMPGDARAAGIPALPAHGITHLAE

SEQ ID NO: 115 - protein, 463 aa, Burkholderia gladioli
MIPLRASLSSGNWRSLLACFLYFDTGFTVWVLYGPLAPFIGKDIVMSAAQQGFLVAVPVLAAAILRVTLGNLYQSTDGRRIALMGVLLSAIPAVVLPFVPGTPSYTLLLVLGVFLGIGGASFAVALPMAGSSYPPKVQGLVLGLAAAGNIGAVLDGFLFPHIAQALGWKFSTAAALPLLAIAGFALFAWAEDRGEKSGSTRRATAAFLVSLAGLVALVLAVHAGLFGAGKTGVLLLPVLGALLAIAVLPARYRAVLAERDTWVVMLVYSITFGGFVGMSSYVSLLLTNLYQMPKIDAGLFMSLLAFLGAIVRPFGGYLADRVTGVRALIVLLAIIAAADFAFAAWMPPLAGGIALLVCLYLAFGLGNGSTFQLVPHRWHGRTGLLSGIVGAAGGIGGFYLPVVMGIAKESTGSYQLGFATFGALATVACGLVVMLRSQWLGWASTAGAGAPAGVALHAAHATE

SEQ ID NO: 116 - protein, 455 aa, Burkholderia pseudomallei
MDTLRTSLRSGNWRSLLACFLYFDTGFTVWVLYGPLAPFISKDIAMTAAQQGFLVAVPVLAAAILRVTLGNLYQSADGRRIALMGVLLSALPAAVLPFVPGTPSYTLLLVLGVFLGIGGASFAVALPMAGSSYPPKVQGLVLGLAAAGNIGAVLDGFMFPHIAAALGWKFSTAAALPLLAIAGFALFAWADDRAEKSGSAARAFGAFVITLGGLVALVLAVHAGLFGAGKAGVLLLPVMGALLAIAVLPGRYRAVLAERDTWVIMLIYSITFGGFVGMSSYVTLLLTTLYQMPKIEAGLFMSLLAFLGAIVRPFGGHLADRITGVRALMAILAAIAAADFAFAAVMPPLAGGIALLVCLYVAFGLGNGSTFQLVPHRWQGKTGLLSGIVGAAGGIGGFYLPVVMGIAKESTGSYQLGFATFGALATCALVALAMLRAQWLRWAAPELAAAEPSAG

SEQ ID NO: 117 - protein, 468 aa, Burkholderia oklahomensis
MDTLRTSLRSGNWRSLLACFLYFDTGFTVWVLYGPLAPFISKDITMTAAQQGFLVAVPVLAAAILRVTLGNLYQSADGRRIALMGVLLSALPAVVLPFLPGTPSYTLLLVLGVFLGIGGASFAVALPMAGSSYPPKVQGLVLGLAAAGNIGAVLDGFMFPHIAAALGWKFSTAAALPLLAIAGFALFAWADDRGEKSGSAKRAFGAFAFTLVGLIALVLAVHEGVFGAGRTGVLLLPVMGALLAIAVLPGRYRAVLAERDTWVIMLIYSITFGGFVGMSSYVTLLLTTLYQMPKIEAGLFMSLLAFLGAIVRPFGGHLADRITGVRALMVILAAIAAADFAFAAVMPPLAGGIALLVCLYIAFGLGNGSTFQLVPHRWKGKTGLLSGIVGAAGGVGGFYLPVVMGIAKESTGSYQLGFATFGALSTCALAALVMLRAQWLRWASPERAAAEPAAGTGMPIGGAARVGD

SEQ ID NO: 118 - protein, 485 aa, Burkholderia pseudomallei
MPFFHHPPSTGIREASPMDTLRTSLRSGNWRSLLACFLYFDTGFTVWVLYGPLAPFISKDIAMTAAQQGFLVAVPVLAAAILRVTLGNLYQSADGRRIALMGVLLSALPAAVLPFVPGTPSYTLLLVLGVFLGIGGASFAVALPMAGSSYPPKVQGLVLGLAAAGNIGAVLDGFMFPHIAAALGWKFSTTAALPLLAIAGFALFAWADDRAEKSGSAARAFGAFVITLGGLVALVLAVHAGLFGAGKAGVLLLPVMGALLAIAVLPGRYRAVLAERDTWVIMLIYSITFGGFVGMSSYVTLLLTTLYQMPKIEAGLFMSLLAFLGAIVRPFGGHLADRITGVRALMAILAAIAAADFAFAAVMPPLAGGIALLVCLYVAFGLGNGSTFQLVPHRWQGKTGLLSGIVGAAGGIGGFYLPVVMGIAKESTGSYQLGFATFGALATCALVALAMLRAQWLRWAAPELAAAEPSAGAGMPIGGAARVGD

SEQ ID NO: 119 - protein, 606 aa, Burkholderia thailandensis
MDAWARTGRSPPCGARVGKRPGAAGASPYPTLDSSHICAPHQCRAHAQAQCRAALARACRRCARAPRRRAPARHPPLSSLAPPFPPALPGVRSRRWEQIHARHWHEACGTAHRPSRAARSGSPLSHHPPSTGIREASPMDTLRTSLRSGNWRSLLACFLYFDTGFTVWVLYGPLAPFISKDITMTAAQQGFLVAVPVLAAAILRVTLGNLYQSADGRRIALMGVLLSALPAAVLPFVPGTPSYTLLLVLGVFLGIGGASFAVALPMAGSSYPPKVQGLVLGLAAAGNIGAVLDGFMFPHIAAALGWKFSTAAALPLLAIAGFALFAWADDRGEKSGSAKRAFGAFALTLAGLVALVLAVHAGVFGTGKTGVLLLPVMGALLAIAVLPGRYRAVLAERDTWVIMLIYSITFGGFVGMSSYVTLLLTTLYQMPKIEAGLFMSLLAFLGAIVRPFGGHLADRITGVRALMVILAAIAAADFAFAAVMPPLAGGIALLVCLYVAFGLGNGSTFQLVPHRWKGKTGLLSGIVGAAGGIGGFYLPVVMGIAKESTGSYQLGFATFGALATCALVALAMLRAQWLRWAAPELAAAEPASGTGMPIGGAARVGD

SEQ ID NO: 120 - protein, 596 aa, Burkholderia pseudomallei
MRRARIDARRDMRVGKRPARAQPDVGFFTYLRIAPMPRARTGAVPPGARARLPPVRAGARPSRAGRCPPPSPFSSPALPGGHSRRSQQNMRPIGMKLAQQRTSPSRASRSGLPFFHHPPSTGIREASPMDTLRTSLRSGNWRSLLACFLYFDTGFTVWVLYGPLAPFISKDIAMTAAQQGFLVAVPVLAAAILRVTLGNLYQSADGRRIALMGVLLSALPAAVLPFVPGTPSYTLLLVLGVFLGIGGASFAVALPMAGSSYPPKVQGLVLGLAAAGNIGAVLDGFMFPHIAAALDWKFSTAAALPLLAIAGFALFAWADDRAEKSGSAARAFGAFVITLGGLVALVLAVHAGLFGAGKAGVLLLPVMGALLAIAVLPGRYRAVLAERDTWVIMLIYSITFGGFVGMSSYVTLLLTTLYQMPKIEAGLFMSLLAFLGAIVRPFGGHLADRITGVRALMAILAAIAAADFAFAAVMPPLAGGIALLVCLYVAFGLGNGSTFQLVPHRWQGKTGLLSGIVGAAGGIGGFYLPVVMGIAKESTGSYQLGFATFGALATCALVALAMLRAQWLRWAAPELAAAEPSAGAGMPIGGAARVGD

SEQ ID NO: 121 - protein, 414 aa, Methylobacterium sp.
MASFKTAMKSGHPPTLFAAFLYFDFCFAIWVLNGAMGPFITETYKLTPAQTGFMISLPILAGALMRFPLGILAQYIGRKNAAITEMTVIMMAMAYGYFVVSSYNDVLAMGVLLGIAGASFGVALSLGSGWFPPEHKGLAMGIAGAGNSGTVLAVLFAPPLAQAYGWQTTYAFAGVVMLIPLAVMIVFAKEPPDNAHQSFKEHVSCLFTKDGWAFSLIYVITFGGFVGLSNFLPTFFYEQFSVTKVEAGRLTMLAAFMGSGIRIVGGYYADRMGGIAVLSVVLLAAIATFLSLMATPSLAVTTLLFMLCFAALGAGNGALFQLVPLRWPTNTAVAGSMIGEVGALGGAILPNVMGLSKQYTGSFSLGFIGYAVFTAAVLGCLMLWQRKWVGSWVGPRGKALGTETETGQLQPATV

SEQ ID NO: 122 - protein, 416 aa, Methylobacterium radiotolerans
MASFKTVMKSGHPPTLFAAFLYFDFCFAIWVLNGAMGPFITETFKLSPAQTGFMISLPILAGALMRFPLGVLAQYIGRKNAAITEMSVIMLAMAYGYLFVSSYNDVLAMGVLLGIAGASFGVALSLGSGWFPPEHKGLAMGIAGAGNSGTVLAVLFAPPLAQAYGWQTTYAFAGVVMLLPLAIMIVLAKEPPDCEHQTFKEHVSCLFTKDGWAFSLIYVITFGGFIGLSNFLPTFFYEQFAVTKVEAGRLTMLAAFMGSGIRIVGGYFADRMGGIAVLSVVLLAAIATLLSLTATPSLALTTLLFMLCFAALGAGNGALFQLVPLRWPTNTAVAGSMIGEIGALGGAILPNVMGLSKQYTGSFSLGFVGYAAFTAVVLGCLALWQRKWVGSWVGPRGKALGTAAEAEQGQLRPATA

SEQ ID NO: 123 - protein, 420 aa, Magnetospirillum magnetotacticum
MASFKTVMKSGHPPTLFAAFLYFDFCFAIWVLNGAMGPFITETYKLTPAQTGFMISLPILAGAIMRFPLGVLAQYIGRKNAALTEMSVIVLAMAYGFFFVSSYNDVLAMGVLLGIAGASFGVALSLGSGWFPPEHKGLAMGIAGAGNSGTVLAVLFAPPLAQAYGWQAVYGFAGLVMIVPLVVMILLAKEPPDCHGQSFKEHVSCLFTKDGWAFSLIYIITFGGFIGLSNFLPTFFYEQFSVTKVEAGRLTMLAALMGSGIRILGGYFADRMGGILVLSLVLLAAIGSFLALTATPSLAVTTLLFMLCFAALGAGNGALFQLVPLRWPTNTAVAGSMIGEVGALGGAILPNVMGFSKQYTGGFATGFVVYALFTGLVLGCLFLWQRKWVGTWVGPRGKVLDPAGETLGEAEGARVAPATA

SEQ ID NO: 124 - protein, 439 aa, Methylobacterium extorquens
MRDRARLKASGASSSPTSTPMASFKTVMKSGHPPTLFAAFLYFDFCFAIWVLNGAMGPFITETYGLTPAQTGFMISLPILAGAIMRFPLGILAQYIGRKNAALTEMGVIVLAMAYGFFFISSYNDVLAMGVLLGIAGASFGVALSLGSGWFPPEHKGLAMGIAGAGNSGTVLAVLFAPPLAQAYGWQAVYGFAGLVMIIPFLVMIFLAKEPPDCHGQTFKEHVSCLFTKDGWSFSLIYIITFGGFIGLSNFLPTFFYEQFAVTKVEAGRLTMLAALMGSGIRILGGYFADRMGGILVLSLVLLAAIGSFLALTATPSLAVTTLLFMLCFAALGAGNGALFQLVPLRWPTNTAVAGSMIGEVGALGGAILPNVMGFSKQYTGGFATGFVAYALFTGLVLGCLFLWQRKWVGAWVGPRGKVLDQPAEAQVQAGGRMEPANA

SEQ ID NO: 125 - protein, 419 aa, Methylobacterium populi
MASFKTVMKSGHPPTLFAAFLYFDFCFAIWVLNGAMGPFITETYKLTPAQTGFMISLPILAGAIMRFPLGVLAQYIGRKNAALTEMSVIVLAMAYGFFFVSSYNDVLAMGVLLGIAGASFGVALSLGSGWFPPEHKGLAMGIAGAGNSGTVLAVLFAPPLAQAYGWQAVYGFAGLVMIVPILVMIVLAKEPPDSHNQTFREHVSCLFTKDGWAFSLIYIITFGGFIGLSNFLPTFFYEQFAVTKVEAGRLTMLAALMGSGIRILGGYFADRMGGILVLSLVLLAAIGSFLALTATPSLAVTTLLFMLCFAALGAGNGALFQLVPLRWPTNTAVAGSMIGEVGALGGAILPNVMGFSKQHTGGFASGFVVYALFTGAVLACLFLWQRKWVGAWVGPRGKVLDQPAEANAQGAGQMEPARA

SEQ ID NO: 126 - protein, 418 aa, Methylobacterium sp.
MADLKTVMKSGHPLTLFAAFLYFDFCFAIWVLNGAMGPFITEAFRLTPAQTGFMISLPILAGAVMRFPLGVLAQYIGRKNAALTEMSLIILAMAYGFFAVSSYGDVLAMGVLLGIAGASFGVALSLGSGWFPPEHKGLAMGIAGAGNSGTVLAVLFAPPLAQAYGWQAVYGFAGLVMAVPLLVMVILAKEPPDREHQSFREHVACLFEKDGWAFNLIYVITFGGFIGLSNFLPTFFYEQFAVTKVEAGRLTMLAALMGSGIRVAGGYFADRIGGILVLTVVLLAAVGSFLLLTASPPLLATTILFMVCFAALGAGNGALFQLVPLRWPTNTAVAGSMIGEIGALGGAILPNAMGLSKQVTGGFAAGFVLYAAFAAAVLGCLALWSRRWVGRWVGPRGKVLSAEPAREGGVLAAGAQRA

SEQ ID NO: 127 - protein, 479 aa, Burkholderia graminis
MNISTARARAGRTLKIWTPEDKAFWRREGEAVAKLNLWISVPALFFAFVIWQMWSVVAVSLPSLGFNYSTNQLFWLAAAPALSGATLRIFYSFMVPIFGGRRWTTISTASLLIPAIGIGFAVQDNTTSYPTMLLLALLCGLGGANFSSSMANISFFFPKERKGSALGVNGGLGNLGVSAVQFLSPLVVTAGMLGIFGGEPQTLVKAGHTSQVWMQNAAFIWVPCIVISTLAAWFGMNDLADVKASFAAQATIFRSRHNWLMCTLYLGTFGSFIGYAAGFPLLIKSQFPGVNPLTYAWLGPFVGALIRPFGGWLADRLGGARVTLWNFVVMALAVVGVLYFLPKTGGSSFSLAWGPRDGSFTGFFAMFLLLFLTTGIGNGSTFRMIPVIFSNLRLCGVPAGDANALADATREGSTEGAAAIGFAGAIGAYGGFFIPKSYGSSILMTGGPELALYCFVVFYLLCIGLTWWFYARRNAGMPC

SEQ ID NO: 128 - protein, 487 aa, Acidovorax citrulli
MPATPSSSSSSPSRGGARAGRVLTLWTPEDKEFWEREGEAIARLNLWISVPALFLSFAIWQVWSVVAVSLPALGFRYSTNQLFWLAAAPALSGATLRIFYSFMVPLVGGRRWTAISTASLLVPALGIGFAVQDSTTAYPTMLALALLCGLGGGNFSSSMANISFFFPKERKGSALGVNAGLGNLGVSVVQFLSPLVITAGVFGVLGGDAQTMVKNGQAQQVWAQNAAFVWVPWIALASLAAWFGMNDIADARASFAAQAAIFRRKHNWIMCVLYLGTFGSFIGFSAGFPLLIKSQFPEVNPLAYAWLGPLVGALIRPVGGWLSDKLGGARVTLWNFVAMALAVLGVLAFLPKGTGGYALAFGPAQGSFAGFFAMFMVLFLTTGIGNGSTFRMIPVIFLNLRLAEVRTGGAGARAQATREGNTEGAAALGFAGALGAYGGFFIPKSYGSSIAATGGPELALWAFAAFYALCIGITWWYYARRHAEMPC

SEQ ID NO: 129 - protein, 486 aa, Delftia sp.
MHANTKTAAKASARSRPGSVLTLWRPEDKQFWEREGEAIARINLWISVPALFLAFAIWQVWSVVAVNLPALGFTYSTNQLFWLAAAPALSGATLRIFYSFMVPLMGGRRWTALSTASLLIPAIGIGYAVQDASTGYPTMLILALLCGLGGGNFSSSMANISFFFPKERKGSALGVNAGLGNLGVSVVQFLSPLVITAGIFGVFGGDAQTITKAGETTRVWAQNAAFIWVPWIAIASLAAWFGMNDIADAKASFAAQAAIFRRKHNWVMCLLYLGTFGSFIGFAAGFPLLIKSQFPAVNPLAYAWLGPLLGALSRPFGGWLADKAGGARVTFWNFLVMAVAVVGVLYFLPKGSGGYALGFGPAEGSFMGFFLMFLVLFLTTGIGNGSTFSMIPAIFLALKQRELGAHPSEQAQAHALKEGNTEGAAALGFAGALGAYGGFFIPKSYGSSIAATGGPELALWVFAAFYVLCVGVTWWYYARRNAEMPC

SEQ ID NO: 130 - protein, 481 aa, Acidovorax sp.
MSNNNVSQGSGRKGRVLTLWTPEDKTFWAREGEAVAKINLWISVPALFLAFAIWQVWSVVAVNLPGLGFKYSTNQLFWLAAAPALSGATLRIFYSFMVPVFGGRRWTALSTASLLIPAIGIGYAVQDNTTSYPTMLLLALLCGLGGGNFSSSMANISFFFPKERKGSALGVNAGLGNLGVSVVQFLSPLVITAGIFGIFGGEPQTIVKNGQEQMVWAQNAAFIWVPWIALAAVAAWFGMNDIADARASFAAQAAIFKRKHNWIMCVLYLGTFGSFIGFAAGFPLLIKALFPEVNPLAYAWLGPLVGAVVRPLGGWLADKVGGARVTVWSFLVMALAVVGVLFFLPKGSGGFALPFGPAEGSFTGFFLMFLVLFFTTGIGNGSTFRMIPVIFLTQKLRELRTDDEASRAQAIKDGNTEGAAAVGFAGALGAYGGFFIPKSYGSSIAATGGPEFALWMFAVFYVLCIIITWWYYSRKHAEMPC

SEQ ID NO: 131 - protein, 481 aa, Alicycliphilus denitrificans
MSANSATQRDSRAGRLLTLWTPEDKQFWEREGEAVAKLNLWISVPALFLAFAIWQVWSVVAVNLPALGFKYSTNQLFWLAAAPALSGATLRIFYSFMVPVFGGRRWTALSTASLLIPAIGIGYAVQDNTTGYPTMLVLALLCGLGGGNFSSSMANISFFFPKERKGSALGVNAGLGNLGVSVVQFLSPLVITAGVFGVFGGDSQTIVKNGEHVQVWAQNAAFIWVPWIAIASVAAWFGMHDIADAKASFAAQAAIFRAKHNWIMCWLYLGTFGSFIGFAAGFPLLIKSQFPDVNPLAYAWLGPLLGALIRPFGGWLSDKVGGGVVTFWNFIVMALAVLGVLFFLPKGMSAYAFPFGPAQGSFTGFFLMFLVLFCTTGIGNGSTFRMIPVIFLNQKLRLLRGNDEAAQAQAIKDGNTEGAAAVGFAGALGAYGGFFIPKSYGSSIAATGGPEFALWMFAVFYVACIVITWWYYSRKNAEMPC

SEQ ID NO: 132 - protein, 481 aa, Xenopus tropicalis
MSTPAASHAGARQGRLLTLWTPEDKQFWQREGEAVAKLNLWISVPALFLAFAIWQVWSVVAVNLPALGFKYSTNQLFWLAAAPALSGATLRIFYSFMVPVFGGRRWTALSTASLLIPAIGIGYAVQDNTTSYPTMLILALLCGLGGGNFSSSMANISFFFPKERKGSALGVNAGLGNLGVSVVQFLSPLVITAGIFGIFGGEAQSIVKNGEHTQVWAQNAAFIWVPWIAIASVAAWFGMHDIADARASFAAQAAIFRAKHNWVMCLLYLGTFGSFIGFAAGFPLLIKALFPEVNPLAYAWLRPLVGAVIRPFSGWLADKVGGGVVTFWNFIVMALAVLGVLYFVPKGTGGYAMPFGPAEGSFAGFFIMFLVLFLTTGIGNGSTFRMIPVIFLTQKLRELGDNDEATKAQAIKEGNTEGAAAVGFAGALGAYGGFFIPKSYGSSIAATGGPEFALWLFAVFYALCVVVTWWYYARRNADMPC

SEQ ID NO: 133 - protein, 469 aa, Acidovorax sp.
MSAITTSGRQGRLLTLWAPEDKSFWEREGEAIAKLNLWISVPALFLAFAIWQVWSVVAVSLPGLGFKYSTNQLFWLAAAPALSGATLRIFYSFMVPLVGGRRWTAISTASLLIPALGIGFAVQDNTTAYPTMLILALLCGLGGGNFSSSMANISFFFPKERKGSALGVNAGLGNLGVSVVQFLSPLVVTAGIFGVFGGDAQTIVKNGQTAQVWTQNAAFIWVPWIALTALAAWFGMNDIADARASFAAQAAIFKRKHNWLMCVLYLGTFGSFIGYAAGFPLLIKSQFPSINPLAYAWLGPLVGAVVRPFGGWLADKLGGARVTLWNFIVMAIAVVGVTVFLPSGGNEGQFAGFFVCFLVLFLTTGIGNGSTFRMIPVIFLTEAMRGVDPLNTAAVAQANKEGNTLGAATLGFTAAMAAYGGFFIPKSYGSSIALTGSPHAALWTFFAFYLVCIVITWWHYARKNAAMPC

SEQ ID NO: 134 - protein, 471 aa, Acidovorax delafieldii
MSANQLSSGERQGRTLTIWTPEDKSFWEREGEAVAKLNLWISVPALFLAFAIWQVWSVVAVSLPGLGFKYSTNQLFWLAAAPALSGATLRIFYSFMVPLVGGRRWTAISTATLLIPAIGIGYAVQDNTTGYPTMLMLALLCGLGGGNFSSSMANISFFFPKERKGSALGVNAGLGNLGVSVVQFLSPLVVTAGIFGIFGGDPQTIVKNGQSAQVWTQNAAFIWVPWIALASLAAWFGMNDIADAKASFATQAAIFRRKHNWLMCVLYLGTFGSFIGYAAGFPLLIKSQFPGVNPLAYAWLGPLVGAVVRPFGGWLADKLGGARVTLWNFVVMALAVVGVIGFLPSGGSAGQFSGFFVCFLVLFLTTGIGNGSTFRMIPVIFLTEALRGVDRNNAAAVAQATKEGNTLGAATLGFTAAMAAYGGFFIPKSYGSSIALTGGPEAALWTFVAFYVICIVITWWYYARKHAEMPC

SEQ ID NO: 135 - protein, 469 aa, Burkholderia sp.
MNSRPLTARPGRTLAIWSPEDKAFWEREGEAIARLNLWISVPALFLAFAIWQVWSVVAVNLPALGFRYSTNQLFWLAAAPALSGATLRIFYSFMVPLVGGRRWTAISTASLLIPAIGIGFAVQDNTTTYPTMLALALLCGLGGGNFSSSMANISFFFPKERKGSALGVNAGLGNLGVSVVQFLSPLVVTAGIFGIFAGEPQSVVKAGQTTLVWTQNAAFIWVPWIALASLAAWFGMNDLAEAKASFAEQAVIFRRKHNWLMCVLYLGTFGSFIGYAAGFPLLIKSQFPAVNPLAYAWLGPLVGAAVRPFGGWLADKLGGARVTLWNFVVMACAVGGVLMFLPNGSSAGSFGGFFACFLVLFLTTGIGNGSTFRMIPVIFLNSKLREVNPSDREAVQRATREGNTEAAATLGFSAAMAAYGGFFIPKSYGSSIALTGGPQAALYVFIAFYLVCIAVTWWHYARRNAPMPC

SEQ ID NO: 136 - DNA, 1368 bp, Singulisphaera acidiphila
atgcgacaagacggcaaggcgacgcggatcaacttgttcgatgtaacgacgccatcgatgcgggcgttccacctgtcgtggattgcgttcttcctctgctttttcgcatggtttggtatcgccccgcagatggcggccgtccgctccgagatgggactcaccaaggaccagatcggttggctgatcatcgggtcggtggcgatcacggtggtctcgcgaatcgtttgcggtgagctctgcgaccggttcgggccacggctcacgtacacctggctcttgatcctcggcagcttgccggtgatgggaatcggcctctcgcacgacttcaaaacgttcctggccttccgggtggccatcggcgccatcggggccgggtttgtcattacgcagtatcacacctcggtgatgtttgctccgaactgcattggcacggccaatgcgacgacagcaggctggggcaacatggggggaggggtgacccagttcgctatgccgctgctcgccgctttcttcgctgcgacgctcggcctgggtgattattggggctggcgcgcctcgatgctcgttgccggtctggtctgcctgttgaccggagtggcctactacttcctgacacaggatacgccgcacggcaacttctccgaacttcgtgcttcagggcggatggctccggccggggcgtcgaaggggacgttcctgcggacggctcgcgaccctcgggtctgggtactcttcgtcatgtacgcggcctgcttcggcgtcgagttgacgatggacggggtcgcccacctgtattaccacgaccacttcggcctgagcgccaaagcggccggcttcgccgccggatcgcttggcctgttgcacatctttgcgagaacgctcggaggctatatcagcgaccgcctgggtggtcgttggggtttgaaagggcgcgtccactggctcttcgtcgcgctcctactcgagggcctcggtctgatgctcttctcgaggatgccgacggtggcgttggcgctcccggcgatgatcggcttcggtctcttcatgaagatgtccgaaggagcgacctacgcggtcgtccctttcgtcaataagaaagcgcttggctcggtgtcggggatcgtcggggcggggggtaatgtcggggccgtcgcggcgggcttcatgttcaagggggcgattgcgtggccgactgccctgttcatcctgggcgccactgtctcggtcgcgtcgttcctggccttcgccatccggttctctctcgagacggagaccgaggctgcccgcgagtgtgccgaggccgaggatcagcgccggcaactggccgaagcgaagccccaaccttcgctcgctggagccgtggcttga

SEQ ID NO: 137 - DNA, 1380 bp, Planctomyces maris
atggaaattcaaaataaggcaaccagaatcaatctgttcaattttaccacgccccagatgcgtgcatttcatatgtcctggtttgcctttttcctctgtttctttgcctggtttggtatcgccccgcttatgaagatcgtgcgggaggaaatgcatctgacccaggagcaggtcggctggtgcattatcggctcggttgccattactgtcatcgcccgactgtttatcggctggctctgcgatcagattggaccccggctcgcttacacatggcttctggttctcggttcactgcctgtgatgggaattggtttcgcacatgattataccacatttctaatctttcgaattgcaattggagcaatcggcgcttcgtttgtgattacccaatatcacacatcaatcatgtttgctccgaactgtgtcgggaccgcaaacgcaacctctgccggctggggtaacctgggtgggggtgtcacacagattgtgatgcctctgattttcacaatgtttatcggcgtattgggattcagtgaatcgatgggctggcgggcatcaatgttcgccgccggtctggtgtgcgctctgacgggaatcgcgtattattttctgacacaggatgctccggaagggaacttcaaagaacttcgcgaagctggcaaactgcctgaaaagaaaatgcagaaagggatgttctggaatgcctgcaaagaccatcgtgtgtgggcgttgtttgtgatttatggtgcctgtttcggcattgagctgaccatcaacaatatcgctgcactctactttctggactacttcgattacttcaagaaaatggagactgcagaagccatcaagatggcgggcctgttcgcggggatgttcgggttaatgaatatttttgcccggaccctgggtggtgccttcggcgaccgcttcggtcagaagtggggcctgagcggacgagtgaaatggttatttgttgtcatcttctgtgaaggaattgctttaatggtcttttcacagatgagcgtactggcgatggcattgccggccttgatcgtcttcagcctgtttgtgcagatgtctgagggagccacgtattctgttgttccttttatcaacaaaaaagcactgggagcggtatccggaatcgtgggtgcaggtggaaatgccggggcagtctctgccggatttctgtttaaaacgcaagccattaactggcctaccgctttattcattctcggggcaattgttaccagttgtgccttcctgacttttttagtccggttcactgaagaaacggaagaagaagcacgtctggctcacgattctgccatcacactgaaaaccggcgaaaaggaacttgccgcttctctgggacaataa

SEQ ID NO: 138 - DNA, 1368 bp, Burkholderia sp.
atgaaaaacgtgatgcactccctgcgaagcggcgattggcgcgcactggtcgcctgctttctgtatttcgacacgggcttcaccgtctgggtgctgtatgggccgctcgcgccgttcatcagcaagagcatcacgatgacgcccgcgcagcagggtctgctggtcgcggtgccggtgttgtccgcggcgattctgcgcgtgacgctcggcaatctgtatcagtccgcgcacggcaaacgcattgcgttgatgggcgtgttgctatcggcggtgccaacgatcgtgctgccgttgctgcaatcggtgccgtcgtacgagatgctgctggtgctcggcgtgttcctcggggttggcggcgccagcttcgcggtcgcgctgccgatggccggcagcaactatccgccgaaggtgcagggcctcgtattgggcctggccgcggccggcaacatcggcgcggtgctcgacggcttcctgttcccgcaactggcgacgcgctacggttggcaactcgccgcgggcggcgccttgccgctgctcgcgatcgccgcgatcacgctgtacttctgggccaacgacgcgggcgtcaaaaccggcagcgtgctgcgcgcgttcggcagtttcgcgacgacgctggccggcctgatcgtgctcgtgctgctcgtcgaagcggggctgttcggcgcgggcaagaccggcgtgctgctgttgccggtgatcggcgcgctgctcgcgatcgcggtgctgccgcaacgctatcgctcggtgcttgccgaacgcgatacgtgggtcatcatgctcgtctatagcatcacgttcggcgggttcgtcggcatgtcttcgtacgtgtcgctgctgctgaccaacctgtatcaactgtcgaagatcgacgcgggtctgttcatggcgctgctcgccgcgaccggcgcgatggtgcgtccgctcggcggcctgattgccgaccgcgtgtcgggcgtgcgcgcgctgaccgtgctgctcgcgatcatcgcgatttgtgacttcctgttcgcgacggcgatgccgtcgttcgcgggcggcatcgcgttgctgctgtgcatgtacgtcgcgttcggactcggcaatggcgcgacgttccagctcgtgccgcatcgctgggccggccgcaccggtttgatgtccggcatcgtcggcgcggcgggtgggatcggcggcttctatctgccggtcgtgatgggcatcgcgaaggagagcaccggcagctatcagatgggcttcgcgacgttcggcacgctgtcggcgtgcgcgttccttgcgatcgtcgcgctgcgccggccgtggatggcgtggtcgatgcagaccggtgtcatgcatgcgcatgcgacggagtga

SEQ ID NO: 139 - DNA, 1368 bp, Burkholderia sp.
atgaaaaacgtgatgagctcgcttaagagcggcgactggcgcgcgttggtggcgtgtttcctctatttcgacaccggcttcaccgtgtgggtgctgtacggcccgcttgcgccgttcatcagcaaaagcatttccatgacgcctgcgcagcagggcctgctcgtcgccgtaccggttctctcggcggcgattctgcgcgtgacgctcggcaacctctatcagtcggcccacggcaagcgcatcgcgctgctcggcgtgctgctctcggccgtgccgaccatcgtactgccggtgctgccgttcgtgccgtcgtacacgctgttgctggtgctcggcgtgtttctcggcgtcggcggggcgagtttcgcggttgctttgccgatggcgggcagcaactatccgccgaaagtgcaaggcctcgtgctgggccttgccgccgcgggcaacatcggtgcagtgctggacggcttcctgttcccgcaactcgccacgcactacggctggcagatggcgacgggcggcgcactgccgttgctcgcgatcgctgcgatcacactctatttctgggccaacgactcgggcgtgaaaaccggcagcgtgctgcgcgcgttcggcagtttcgtcgtgacgctcgtcggtctgatcgtgctcgtgctgctcgtcgaagcgggcattttcggcgcgggcaagacgggcgtgctgctgttgcccgtcatcggcgcgctgctcgcaattgcggtgctgcccaagcgctatcgcgcggtgctggcggagcgcgatacgtgggtcatcatgctcgtctatagcatcacgttcggcggtttcgtcggcatgtcctcgtatgtttcgctgctgctcaccaacctctatcagctttcaaaaatcgacgcgggccttttcatggcgctgcttgcggcaaccggcgcgctggtgcgtccgctcggcggcctgattgccgacaaggtatccggcgtgcgcgcactcaccgtgctgctcgcaacgatctcgctcgccgacttcgtcttcgccgcgctcatgccgacgctcgccggcggcattgcgttgctggtgtgcctgtatgtggcgttcgggctcggcaatggtgcgacgttccagctcgtgccgcatcgctgggctggccgaaccggcttgatgtcgggcatcgtcggtgcagcgggcgggatcggcggcttttatctgccggtcgtgatgggcatcgcgaaggaaagcaccgggtcgtatcagatgggctttgcgactttcggtgcgctcgctgcctgcgcgttcctcgcaatcgttgcgctgcgccggccgtggatggcgtggtcgctgcaatcggccgctttgcacgctcatgcaaccgaatga

SEQ ID NO: 140 - DNA, 1368 bp, Burkholderia phytofirmans
atgaaaaacgtgatgagctccctaaagagtggggactggcgcgcgctggtggcgtgtttcctctatttcgacacgggctttaccgtgtgggtcctgtatggaccgctcgcaccgttcatcagcaagagcatcgcgatgacacccgcgcaacagggtttgctggtcgcggtgccggtgctgtcggctgcgattctgcgcgtgacgctcggtaacctgtatcaatccgcgcacggcaagcgcattgcgctgatgggcgtgctgttgtcggcggtgccgaccatcgtgttgccgcttatgccgtccgtgccgtcgtacacggtgctgctggtgctcggcgtgttcctcggcgtgggcggtgcgagtttcgcggtagcgttgccgatggcgggcagcaactatccgccgaaggtgcagggcctcgtgttgggccttgccgcggccggcaatatcggcgcggtgctcgacggctttctgttcccgcaactggcgacacactacggctggcagatggccgccggcggcgctctgcctttgctcgcgatcgccgcgatcacgctgtatttctgggccaacgactccggcgtgaaaacgggcagcgtgctgcgcgcattcggcagctttgcggtgacgctggtcggcttgatcgtgctggtgctgctcgtcgaagccggcatgttcggctccggcaaaacgggggtgctgctgttgccggtgatcggcgctctgctggcgatcgcggtgctgccgaaacgttatcgcgcggtgcttgccgagcgtgacacgtgggcgatcatgctggtctacagcattacgttcggcggtttcgtgggtatgtcttcttatgtcacgctgctgctgaccaatctctatcaactctcgaagatcgacgcgggcctcttcatggcgctgctcgccgcgaccggcgcgatggtgcgcccgctcggcggcctgattgccgacaaggtgtccggcgtacgtgcgctgaccttcctgctcgcggtcatctcgctgtgcgacttcgtgttcgctgcggccatgccggcaatggccggtggcatcgcgctgctgttgtgcctgtatgtggccttcggtctcggcaacggcgcgaccttccagttggtgccgcatcgctgggccggccgcacgggtctgatgtcgggcatcgtcggcgccgcgggcggcatcggcggattttatctgcctgtcgtgatgggtatcgcaaaggaaagcacgggcagctatcaaatgggcttcgcgacgttcggcgcactggcggcctgcgcgttcgtcgcaatcgtcgcgctgcgccgtccgtggatggcgtggtcgatgcacaccggtgtgatgcacgcgcacgcaacggagtaa

SEQ ID NO: 141 - DNA, 1389 bp, Burkholderia sp.
atgtccaatctgatcgcatcgctcaagagcggcaactggcgctcgctcctcgcctgcttcctctacttcgatacgggctttaccgtctgggtactgtttgggccgctcgcgccgttcatcggacgcgacgtgacgatgtccgccgcgcagcaaggctttctcgtcgcggtgccggtgctggccgccgccattctgcgcgtgacgctcggcaacctctatcaatcgaccgatggacggcgcgtcgcgctgatgggcgtcctgctctcgtcgattccgtcgatcgtgctgccgctcatgcccggcgtgccgtcgtatgcggtgttgcttgtgctcggcgtgttcctcggcatgggcggcgcgagcttcgccgtcgcgttgccgatggctggcagcaactatccgccgaaggtgcagggcctcgtgctcggactcgccgcggcaggcaacatcggcgcggtgctcgacggcttcctgttcccgcatctcgccgatgccttcggctggcagatgtcgaccgccgccgcgctgccgctgctcgcgattacgggcgtcgcgctcttcgcatgggcgtccgatgccggcgtgaaaaccggcagcacgatgcgcgcgctgtcgagcttcgcggtgacgctcgtgagcctgatcgtgctggtgctcgcggtcaacgcgggtgtgttcggcggcggcaaggcgggcgtgctgctcttgccggtgatcggcgcgctcattgcgatcgcggtgctgccgcggcattatcggtcggtgctcggcgagcgcgacacgtgggtcatcatgctcatttacagcatcacgttcggcggtttcgtcggcatgtcgtcgtatgtgacgctgctgcttacctcgctttatcagatgccgaagctcgaagccggcctcttcatgtcgctgctcgcgtttctcggcgcgatcgtgcgtccgttcggcggttatgtcgccgatcgcgtgaccggcgtgcgtgcgctgctcgtgctgctcgcggccatcgccatcggcgacttcgcgttcgcgatctggatgccgccggtcgcgggcggtctcgcgattctcatctgcctgtatatcgcgttcggcctgggcaacggctcgacgttccagctcgtcccgcatcgctggaagggcaagacgggattgctgtcaggaatcgtcggtgcagcgggcggtatcggcgggttctatctgccggtcatcatgggcatcgcgaaggaaagcacgggcagctatcaaatgggcttcgccacgttcggcgtgctcgcaacgtgcgcgttcggcgcgctcttcgcgctgcgcggtcagtggctgcgctggtcgtcgacggcttcgcaatcgcacgatggcgtcgccatcggcggcgcgcacgcgatggagtga

SEQ ID NO: 142 - DNA, 1389 bp, Burkholderia sp.
atgtccaatctgatcgcatcgctcaagagcggcaactggcgctcgctgctcgcctgcttcctttacttcgacacgggcttcaccgtctgggtgctgtacgggccgctcgcgccgttcatcggccgcgacgtgacgatgtccgccgcgcaacagggctttctggtcgcggtgccggtgctcgccgcggcgatcctgcgcgtgacgctcggcaatctctatcaatccgccgacggacggcgcgtcgcgctgacgggcgtcgcgctgtcgtcgattccatcgatcgtgctgccgctcatgtccggcgcgccgtcgtattcgcttctgctcgtgctcggcgtgtttctcggcatgggcggcgcgagcttcgccgtcgcgctgccgatggccggcagcaactatccgccgaaggtgcaagggctcgtgctcggtctcgccgccgcgggcaacatcggcgcggtgctcgacggcttcctgttcccgcatctcgccgatgccttcggctggcggatgtcgaccgccgccgccttgccgctgctcgccatcacggcggtcgcgctctacgcgtgggcggcggatgcgggcgagaaaaccggcagcacgatgcgcgcgctgtccagcttcgcggtgacgcttttcagcctgatcgtgctcgtgctcgcggtgcacggtggcgtgttcggcggcggcagggccggcgtgctgctgttgcctgtgattggcgcgctgatcgccatcgcggtgctgccgcggcgctaccggtcggtgctgcgcgagcgcgatacgtgggtcgtcatgctcatctacagcatcacgttcggcggattcgtggggatgtcgtcgtatgtgacgctcctgctcacgtcgctgtatcagatgccgaagctcgaagccggcctcttcatgtcgctgctcgcgtttctcggcgcgatcgtgcgaccgttcggcggctatgtcgcggatcgcgtgacgggcgtgcgcgcgctgctcgtgctgctcgccgcgattgccgccggcgacttcgcattcgcgatcttcatgccgccggttgcgggcggtctcgcgatcctcgtttgcctgtatatcgcgttcgggctgggcaacggttcgacgttccagctcgtgccgcatcgctggaagggcaagacggggctgctgtcggggatcgtcggcgcggcgggcggcatcggcgggttctatctgccggtgatcatgggcatcgccaaggaaagcaccggcagctatcagatgggcttcgccactttcggcgtgctcgcgacctgcgcgttcggcgcgctgttcgtgctgcgcgggcagtggctgcgctggtcgtcgacttcgtcgcactcgcacgatggcgtcgcgatcggcggggcgcatgcgatggagtga

SEQ ID NO: 143 - DNA, 1392 bp, Burkholderia thailandensis
atgaagcttgcggaacagcgcaccggctcgtcgccccatttccaccatccgccgtcgaccggcatacgcgaggcttcaccgatggatactctgcgcacctccctccgaagcggcaactggcgctcgcttctcgcgtgcttcctctacttcgacacgggcttcaccgtctgggtgctgtacggcccgctcgcgccgttcatcggcaaggacatcacgatgacggccgcgcaacagggcttcctcgtcgcggtgccggtgctcgcggcggccatcctgcgcgtcacgctcggcaacctctaccagtccgccgacggccggcgcatctcgctgatgggcgtgctgctgtccgcgctgcccgccgtcgttctgccgttcgtgcccggcacgccgtcgtacacgctgctcctcgtgctcggcgtgttcctcgggatcggcggcgcgagcttcgcggtcgcgctgccgatggcgggcagcagctatccgccgaaggtgcagggcctcgtgctcggcctcgccgccgcgggcaacatcggcgcggtgctcgacggcttcatgttcccgcacatcgcggccgcgctcggctggaaattctcgacggccgccgcgctgccgctcctcgcgatcgcgggcttcgcgctcttcgcgtgggccgacgaccgcggcgagaagtcgggcaacgcgaaacgcgcgttcggcgcgttcgtgctcacgctcgtcggcctcgtcgcgctcgtgctcgccgtgcatgcgggcgtgttcggcgcgggcaagacgggcgtgctgctgctgcccgtgatgggcgcgctcctcgcgatcgccgtgctgcccggccgctatcgcgcggtgctcgccgagcgcgacacgtgggtcatcatgctgatctacagcatcacgttcggcggcttcgtcgggatgtcgtcgtacgtgacgctgcttctcacgacgctctaccagatgccgaagatcgaagcgggcctcttcatgtcgctgctcgcgttcctcggcgcgatcgtgcgcccgttcggcggccacctcgccgaccgcatcaccggcgtgcgcgcgctgatggtgatcctcgccgcgatcgccgccgccgacttcgcgttcgcggccgtgatgccgccgctcgcgggcgggatcgcgctcctcgtgtgcctgtacgtcgcgttcggcctaggcaacggctcgacgttccagctcgtcccgcaccgctggaagggcaagaccggcctgctgtccggcatcgtcggcgcggcgggcggcatcggcggcttctatctgcccgtcgtgatgggcatcgcgaaggaaagcacgggcagctaccagctcggtttcgcgacgttcggcgcgctctcgacctgcgcgctcgccgcgctcgtgatgctgcgcgcg

SEQ ID NO: 144 - DNA, 1284 bp, Burkholderia pseudomallei
atggatactctgcgcacctccctccgaagcggcaactggcgctcgcttctcgcgtgtttcctttatttcgatacgggcttcaccgtctgggtgctgtacgggccgctcgcgccgttcatcagcaaggacatcgcgatgacggccgcgcagcaaggctttctcgtcgcggtgccggtgctcgcggcggccatcctgcgcgtgacgctcggcaacctttaccagtccgccgacggccggcgcatcgcgctgatgggcgtactgctgtccgcgctgcccgccgccgtgctgccgttcgtgcccggcacgccgtcgtacacgctgctcctcgtgctcggcgtgttcctcgggatcggcggcgcgagcttcgcggtcgcgctgccgatggcgggcagcagctatccgccgaaggtgcagggcctcgtgctcggcctcgccgccgcgggcaacatcggcgcggtgctcgacggcttcatgttcccgcacatcgcggccgcgctcgactggaagttctcgacggccgccgcgctgccgctgctcgcgatcgcgggcttcgcgctcttcgcgtgggccgacgaccgcgcagagaaatcgggcagcgcggcgcgcgcgttcggcgcgttcgtgatcacgctcggcggtctcgtcgcgctcgtgctcgccgtgcacgcgggcctgttcggcgcgggcaaggcaggcgtgctgctgctgcccgtgatgggcgcgctgctcgcgatcgccgtgctgcccggccgctatcgcgcggtgctcgccgagcgcgacacgtgggtcatcatgctgatctacagcatcacgttcggcggcttcgtcggcatgtcgtcgtacgtgacgctgctgctgacgacgctctaccagatgccgaagatcgaagcgggcctgttcatgtcgctgctcgcgtttctcggcgcgatcgtgcgcccgttcggcggccacctcgccgaccgcatcaccggcgtgcgcgcgctcatggcgatcctcgccgcgatcgccgcggccgacttcgcgttcgcggccgtgatgccgccgctcgcgggcggcatcgcgctgctcgtgtgcctgtacgtcgcgttcggcctcggcaacggctcgacgttccagctcgtcccgcaccgctggcagggcaagacgggcctgctgtccggcatcgtcggcgcggcgggcggcatcggcggcttctatctgcccgtcgtgatgggcatcgcgaaggaaagcacgggcagctatcagctcggcttcgcgacgttcggcgcgctcgcgacctgcgcg

SEQ ID NO: 145 - DNA, 1401 bp, Burkholderia cepacia
atgacgcgtttgcgcacctccctgcagagcggcaactggcgctcgctgctcgcgtgcttcctgtatttcgacaccggcttcaccgtctgggtgctgtacggcccgctcgcgccgttcatcggcaaggacatcgcgatgtccgccgcgcaacagggctttctcgtcgcggtgccggtgctcgccgcggcgatcctgcgcgtgacgctcggcaacctgtaccaatccgcgaacgggcgcacgatcgcgctgatgggcgtcgtgttgtccgcgctgccggccatcgtgctgccgtgcgtgcccggcacgccgtcgtatgcactgctgctcgtcctcggcgtgttcctcggcatgggcggtgcgagtttcgcggtggcgctgccgatggcaggcagcagctatccgccgaaagtgcaggggctcgtgctcggcctcgccgcggccggcaacatcggcgcggtgctcgacggcttcatgtttccgcacatcgcggccgcggtcggctggaagctctcgaccgccgccgcgctgccgctgctcgcgattgccggcttcgcgatcatcgcgtgggccgacgaccgcggcgaaaaatccggcagcgtgccgcgcgcgctcggcgcgttcgccatcacgctcgcgggcctcgtcgcgctcgtcctggccgtgcacggcgggctgttcggggccggcaagaccggcgtgctgctgctgccggtgatgggcgcgctgctcgcgatcgcgatcctgcccgcgcgctaccgcgcggtgctcgccgagcgcgatacgtgggtcatcatgctgatctacagcatcacgttcggcggcttcgtcggcatgtcgtcatacgtgacgctgctgctgacgtcgctgtaccagatgccgaagatcgacgccggcctgttcatgtcgctgctcgccttccttggcgccatcgtgcggccgctcggcggcttcatcgcggatcgcgtcaccggcgtgcgcacgctgatcgtgctgctcgccgcgattgccgtcgccgacttcgcgttcgccgcctggatgccgccgctggcaggcggcatcgcgttgctgatctgcctgtacgtcgccttcgggctcggcaacggcgcgaccttccagctcgtgccgcaccgctggcaaggcaagaccggcctgctgtccggcatcgtcggcgccgcgggcggcatcggcggcttctatctgcccgtcgtgatgggcatcgcgaaggaaagcaccggcagctatcagctcggcttcgtgacgttcggcgccctcgccgcctgtgcatgcggcgcactcgttttgctgcgtgcgcaatggcttggctgggccatgcccggcgacgcgcgcgccgccggcataccggcgctgccggcgcacggcatcacgcaccttgccgagtga

SEQ ID NO: 146 - DNA, 1392 bp, Burkholderia gladioli
atgatccccctccgtgcctcgctctcgagcggcaactggcgctcgctgctcgcctgcttcctctacttcgacacgggcttcaccgtgtgggtgctgtacgggccgctcgcgcccttcatcggcaaggacatcgtcatgtcggccgcgcagcaggggttcctggtcgcggtgccggtgctggccgccgcgatcctgcgcgtgacgctgggcaacctctaccagtcgaccgacgggcgccgcatcgcgctgatgggcgtgctgctgtcggcgattcccgcggtggtgctgcccttcgtgccgggcacgccctcctacacgctgctgctggtgctgggcgtgttcctcggcatcggcggcgcgagcttcgcggtggcgctgccgatggccggcagcagctatccgcccaaggtgcagggcctggtgctgggcctggcggcggccggcaacatcggcgcggtgctggacggcttcctgttcccccatatcgcgcaggcgctgggctggaagttctcgacggcggccgcgctgccgctgctggcgatcgccggtttcgcactgttcgcctgggccgaggaccgcggcgagaagtcgggcagcacgcgacgcgcgacggcggccttcctggtctcgctggcgggcctggtggcgctggtgctggcggtccatgccggcctgttcggcgccggcaagaccggcgtgctgctgttgccggtgctcggcgcgctgctggccatcgcggtgctgccggcccgctatcgcgcggtgctggccgagcgcgacacctgggtggtgatgctggtctacagcatcaccttcggcggcttcgtggggatgtcctcctacgtgagcctgctgctgaccaacctctaccagatgccgaagatcgacgcgggcctgttcatgtccctgctcgccttcctcggcgcgatcgtgcggccgttcggcggctacctcgccgaccgcgtgaccggcgtgcgcgcgctgatcgtgctgctggcgatcatcgccgcggccgacttcgcgttcgccgcctggatgcccccgctggcgggcggcatcgcgctgctggtgtgcctctacctcgccttcggcctgggcaacggctcgaccttccagctggtaccgcatcgctggcacggccgcaccgggctgctgtcggggatcgtcggcgcggccggcggcatcggcggtttctacctgccggtggtgatgggcatcgccaaggaaagcaccggcagctaccagctcggcttcgcgaccttcggcgcgctggccaccgtcgcctgcggcctggtggtgatgctgcgctcgcaatggctcggctgggccagcaccgccggcgccggcgccccggcgggcgtggcgctgcatgccgcgcacgccaccgagtga

SEQ ID NO: 147 - DNA, 1364 bp, Burkholderia pseudomallei
atggatactctgcgcacctccctccgaagcggcaactggcgctcgcttctcgcgtgtttcctttatttcgatacgggcttcaccgtctgggtgctgtacgggccgctcgcgccgttcatcagcaaggacatcgcgatgacggccgcgcagcaaggctttctcgtcgcggtgccggtgctcgcggcggccatcctgcgcgtgacgctcggcaacctttaccagtccgccgacggccggcgcatcgcgctgatgggcgtactgctgtccgcgctgcccgccgccgtgctgccgttcgtgcccggcacgccgtcgtacacgctgctcctcgtgctcggcgtgttcctcgggatcggcggcgcgagcttcgcggtcgcgctgccgatggcgggcagcagctatccgccgaaggtgcagggcctcgtgctcggcctcgccgccgcaggcaacatcggcgcggtgctcgacggcttcatgttcccgcacatcgcggccgcgctcggctggaagttctcgacggccgccgcgctgccgctgctcgcgatcgcgggcttcgcgctcttcgcgtgggccgacgaccgcgcagagaaatcgggcagcgcggcgcgcgcgttcggcgcgttcgtgatcacgctcggcggtctcgtcgcgctcgtgctcgccgtgcacgcgggcctgttcggcgcgggcaaggcaggcgtgctgctgctgcccgtgatgggcgcgctgctcgcgatcgccgtgctgcccggccgctatcgcgcggtgctcgccgagcgcgacacgtgggtcatcatgctgatctacagcatcacgttcggcggcttcgtcggcatgtcgtcgtacgtgacgctgctgctgacgacgctctaccagatgccgaagatcgaagcgggcctgttcatgtcgctgctcgcgtttctcggcgcgatcgtgcgcccgttcggcggccacctcgccgaccgcatcaccggcgtgcgcgcgctcatggcgatcctcgccgcgatcgccgcggccgacttcgcgttcgcggccgtgatgccgccgctcgcgggcggcatcgcgctgctcgtgtgcctgtacgtcgcgttcggcctcggcaacggctcgacgttccagctcgtcccgcaccgctggcagggcaagacgggcctgctgtccggcatcgtcggcgcggcgggcggcatcggcggcttctatctgcccgtcgtgatgggcatcgcgaaggaaagcacgggcagctatcagctcggcttcgcgacgttcggcgcgctcgcgacctgcgcgctcgtcgcgctcgcgatgctgcgcgcgcagtggctgcgctgggcggcgcccgagctcgccgcggccgagccgtcggcggg

SEQ ID NO: 148 - DNA, 1407 bp, Burkholderia oklahomensis
atggatactttgcgcacctccctccggagcggcaactggcgctcgcttctggcgtgcttcctctacttcgatacgggcttcaccgtctgggtgctgtacggcccgctcgcgccgttcatcagcaaggacatcacgatgacggccgcgcaacagggcttcctcgtcgccgtgccggtgctcgcggcggccatcctgcgcgtcacgctcggcaacctgtatcagtccgccgacggccggcgcatcgcgctgatgggcgtgctgctgtccgccctgcccgccgtcgtgctgccgttcctgcccggcacgccgtcgtacacgctgctcctcgtgctcggcgtgttcctcgggatcggcggcgcgagcttcgcggtcgcgctgccgatggcgggcagcagctatccgccgaaggtgcagggcctcgtgctcggcctcgccgcggcgggcaacatcggcgcggtgctcgacggcttcatgttcccccacatcgcggccgcgctcggctggaagttctcgacggcggccgcgctgccgctcctcgcgatcgccggcttcgcgctcttcgcgtgggccgacgaccgcggcgagaaatcgggcagcgcgaagcgcgcgttcggcgcgttcgcgttcacgctcgtcgggctgatcgcgctcgtgctcgccgtgcacgaaggcgtgttcggcgcgggcaggacgggcgtgctgctgctccccgtgatgggcgcgctcctcgcgatcgccgtgctgcccggccgctaccgcgcggtgctcgccgagcgcgacacgtgggtcatcatgctgatctacagcatcacgttcggcggcttcgtcgggatgtcgtcgtacgtgacgctgctcctcacgacgctctaccagatgccgaaaatcgaagcgggcctcttcatgtcgctgctcgcgttcctcggcgcgatcgtgcgcccgttcggcggccacctcgccgaccgcatcaccggcgtgcgcgcgctgatggtgatcctcgcggcgatcgccgccgccgacttcgcgttcgcggccgtgatgccgccgctcgccggcggaatcgcgctcctcgtgtgcctgtacatcgcgttcggcctcggcaacggctcgacgttccagctcgtcccgcaccgctggaaaggcaagacgggcctgctgtccggcatcgtcggcgcggcgggtggcgtcggcggcttctatttgcccgtcgtgatgggcatcgcgaaggaaagcacgggcagctatcagctcggcttcgcgacgttcggcgcgctgtcgacctgcgcgctcgccgcgctcgtcatgctgcgcgcgcagtggctgcgctgggcctcgcccgagcgcgcggcggccgagccggcggccggaaccgggatgccgatcggcggcgcggcgcgcgtcggcgactga

SEQ ID NO: 149 - DNA, 1458 bp, Burkholderia pseudomallei
ttgccctttttccaccatccgccgtcgaccggcatacgcgaggcttcaccgatggatactctgcgcacctccctccgaagcggcaactggcgctcgcttctcgcgtgtttcctttatttcgatacgggcttcaccgtctgggtgctgtacgggccgctcgcgccgttcatcagcaaggacatcgcgatgacggccgcgcagcaaggctttctcgtcgcggtgccggtgctcgcggcggccatcctgcgcgtgacgctcggcaacctttaccagtccgccgacggccggcgcatcgcgctgatgggcgtactgctgtccgcgctgcccgccgccgtgctgccgttcgtgcccggcacgccgtcgtacacgctgctcctcgtgctcggcgtgttcctcgggatcggcggcgcgagcttcgcggtcgcgctgccgatggcgggcagcagctatccgccgaaggtgcagggcctcgtgctcggcctcgccgccgcgggcaacatcggcgcggtgctcgacggcttcatgttcccgcacatcgcggccgcgctcggctggaagttctcgacgaccgccgcgctgccgctgctcgcgatcgcgggcttcgcgctcttcgcgtgggccgacgaccgcgcagagaaatcgggcagcgcggcgcgcgcgttcggcgcgttcgtgatcacgctcggcggtctcgtcgcgctcgtgctcgccgtgcacgcgggcctgttcggcgcgggcaaggcaggcgtgctgctgctgcccgtgatgggcgcgctgctcgcgatcgccgtgctgcccggccgctatcgcgcggtgctcgccgagcgcgacacgtgggtcatcatgctgatctacagcatcacgttcggcggcttcgtcggcatgtcgtcgtacgtgacgctgctgctgacgacgctctaccagatgccgaagatcgaagcgggcctgttcatgtcgctgctcgcgtttctcggcgcgatcgtgcgcccgttcggcggccacctcgccgaccgcatcaccggcgtgcgcgcgctcatggcgatcctcgccgcgatcgccgcggccgacttcgcgttcgcggccgtgatgccgccgctcgcgggcggcatcgcgctgctcgtgtgcctgtacgtcgcgttcggcctcggcaacggctcgacgttccagctcgtcccgcaccgctggcagggcaagacgggcctgctgtccggcatcgtcggcgcggcgggcggcatcggcggcttctatctgcccgtcgtgatgggcatcgcgaaggaaagcacgggcagctatcagctcggcttcgcgacgttcggcgcgctcgcgacctgcgcgctcgtcgcgctcgcgatgctgcgcgcgcagtggctgcgctgggcggcgcccgagctcgccgcggccgagccgtcggcgggcgccgggatgccgatcggcggcgcggcgcgcgtcggcgactga

SEQ ID NO: 150 - DNA, 1821 bp, Burkholderia thailandensis
atggacgcatgggcgcgcacgggccgaagccccccctgtggcgcacgcgtcggcaaacggcccggggccgcgggcgcctcgccataccctacgcttgattcttcacacatttgcgcaccgcaccaatgccgcgcgcacgcacaggcgcagtgccgcgcggcgctcgcgcgcgcctgccgccggtgcgcgcgagcgccgcgccgccgcgcgcccgcccgtcacccgccgctttcatcgcttgcgccgcctttcccgcctgccttgcccggcgtgcgttcgcgtcgttgggagcaaatacatgcacgccattggcatgaagcttgcggaacagcgcaccggccgtcccgcgcagcgcggagcggctcgcctctttcccaccatccgccgtcgaccggcatacgtgaggcttcaccgatggatactctgcgcacctcccttcgaagcggcaactggcgctcgcttctcgcgtgcttcctctacttcgatacgggcttcaccgtctgggtgctgtacggcccgctcgcgccgttcatcagcaaggacatcacgatgacggccgcgcaacagggcttcctcgtcgcggtgcccgtgctcgcggcggccatcctgcgcgtgacgctcggcaacctctatcagtccgccgacggccggcgcatcgcgctgatgggcgtgctgctgtccgcgctgcccgccgccgtgctgccgttcgtgcccggcacgccgtcatacaccctgctcctcgtactcggcgtgttcctcgggatcggcggcgcgagcttcgcagtcgcgctgccgatggcgggcagcagctatccgccgaaggtgcagggcctcgtgctcggcctcgccgccgcgggcaacatcggcgcagtgctcgacggcttcatgttcccgcacatcgcggccgcgctcggctggaagttctcgacggccgccgcgctgccgctcctcgcgatcgcgggcttcgcgctcttcgcgtgggccgacgaccgcggcgagaaatcgggcagcgcgaagcgtgcgttcggcgcgttcgcgctcacacttgccggtctcgtcgcgctcgtgctcgccgtgcatgcgggcgtgttcggcacgggcaagacaggcgtgctgctgctgcccgtcatgggcgcgctcctcgcgatcgccgtgctccccggccgctatcgcgcagtgctcgcggagcgcgacacgtgggtcatcatgctgatctacagcatcacgtttggcggcttcgtcggcatgtcgtcttacgtgacgctgcttctgacgacgctctatcagatgccgaagatcgaagcgggcctcttcatgtcgctgctcgcgttcctcggcgcgatcgtgcgcccgttcggcggccacctcgccgaccgcatcaccggcgtgcgcgcgctgatggtgatcctcgccgcgatcgccgcggcagacttcgcgttcgcggccgtgatgccgccgctcgcgggcggcatcgcgctcctcgtgtgcctgtacgtcgcgttcggcctcggcaacggctcgacgttccagctcgtcccgcaccgctggaaaggcaagacgggcctgctgtccggcatcgtcggcgcggcgggcggcatcggcggcttctatctgcccgtcgtgatgggcatcgcgaaggaaagcacgggcagctaccagctcggcttcgcgacgttcggcgcgctcgcgacctgcgcgctcgtcgcgctcgcgatgctgcgcgcacagtggctgcgctgggccgcgcccgagctcgccgcggccgagccggcctcgggcaccgggatgccgatcggcggcgcggcgcgcgtcggcgactga

SEQ ID NO: 151 - DNA, 1791 bp, Burkholderia pseudomallei
gtgcggcgcgcgcgaatcgacgcgcggcgcgacatgcgcgtcggcaagcggcccgcacgcgcacagccggacgtcggattcttcacatatttgcgcatcgcaccaatgccgcgcgcgcgcacaggcgcagtgccgcccggcgctcgcgcgcgcctgccgccggtgcgcgcgggcgcccggccgtcgcgcgcaggccgttgcccaccgccttcgccgttttcctcgcccgccttgcccggcgggcattcgcgccgttcacagcaaaacatgcgccccattggcatgaagcttgcgcaacagcggaccagcccgtcccgcgcatcgcggagcggcttgccctttttccaccatccgccgtcgaccggcatacgcgaggcttcaccgatggatactctgcgcacctccctccgaagcggcaactggcgctcgcttctcgcgtgtttcctttatttcgatacgggcttcaccgtctgggtgctgtacgggccgctcgcgccgttcatcagcaaggacatcgcgatgacggccgcgcagcaaggctttctcgtcgcggtgccggtgctcgcggcggccatcctgcgcgtgacgctcggcaacctttaccagtccgccgacggccggcgcatcgcgctgatgggcgtactgctgtccgcgctgcccgccgccgtgctgccgttcgtgcccggcacgccgtcgtacacgctgctcctcgtgctcggcgtgttcctcgggatcggcggcgcgagcttcgcggtcgcgctgccgatggcgggcagcagctatccgccgaaggtgcagggcctcgtgctcggcctcgccgccgcgggcaacatcggcgcggtgctcgacggcttcatgttcccgcacatcgcggccgcgctcgactggaagttctcgacggccgccgcgctgccgctgctcgcgatcgcgggcttcgcgctcttcgcgtgggccgacgaccgcgcagagaaatcgggcagcgcggcgcgcgcgttcggcgcgttcgtgatcacgctcggcggtctcgtcgcgctcgtgctcgccgtgcacgcgggcctgttcggcgcgggcaaggcgggcgtgctgctgctgcccgtgatgggcgcgctgctcgcgatcgccgtgctgcccggccgctatcgcgcggtgctcgccgagcgcgacacgtgggtcatcatgctgatctacagcatcacgttcggcggcttcgtcggcatgtcgtcgtacgtgacgctgctgctgacgacgctctaccagatgccgaagatcgaagcgggcctgttcatgtcgctgctcgcgtttctcggcgcgatcgtgcgcccgttcggcggccacctcgccgaccgcatcaccggcgtgcgcgcgctcatggcgatcctcgccgcgatcgccgcggccgacttcgcgttcgcggccgtgatgccgccgctcgcgggcggcatcgcgctgctcgtgtgcctgtacgtcgcgttcggcctcggcaacggctcgacgttccagctcgtcccgcaccgctggcagggcaagacgggcctgctgtccggcatcgtcggcgcggcgggcggcatcggcggcttctatctgcccgtcgtgatgggcatcgcgaaggaaagcacgggcagctatcagctcggcttcgcgacgttcggcgcgctcgcgacctgcgcgctcgtcgcgctcgcgatgctgcgcgcgcagtggctgcgctgggcggcgcccgagctcgccgcggccgagccgtcggcgggcgccgggatgccgatcggcggcgcggcgcgcgtcggcgactga

SEQ ID NO: 152 - DNA, 1245 bp, Methylobacterium sp.
atggccagcttcaagacggcgatgaagtcgggtcaccccccgacgctgttcgcggcgttcctctacttcgatttctgcttcgcgatctgggtcctgaacggcgccatgggcccgttcatcaccgagacctacaagctcaccccggcccagaccgggttcatgatctcgctgccgatcctcgccggggcgctgatgcgcttcccgctcgggatcctggcccagtatatcggccgcaagaacgcggcgatcacggagatgaccgtgatcatgatggcgatggcctacggatacttcgtggtgtcgtcctacaacgacgtgctcgccatgggcgtgctgctcggcatcgccggggcctccttcggggtggctttgtcgctcggctcgggctggttcccgccggagcacaaggggctggcgatgggcatcgcgggcgccggcaattccggcaccgtgctggccgtgctgttcgccccgccgctggcccaggcctatggctggcagaccacctacgccttcgccggcgtggtgatgctgatcccgctcgcggtcatgatcgtgttcgccaaggagccgccggacaacgcccaccagtcgttcaaggagcacgtctcctgcctgttcaccaaggacggctgggcgttctcgctgatctacgtgatcaccttcggcggcttcgtcggcttgtcgaacttcctgccgaccttcttctacgagcaattctccgtgacgaaggtcgaggctgggcggctgaccatgctggccgccttcatgggctcgggcatccggatcgtcggcggctactacgccgaccggatgggcgggatcgcggtcctgtcggtggtgctgctcgcagcgatcgccaccttcctgtcgctgatggcgacgccctcgctcgccgtgaccacgctgctgttcatgctgtgcttcgcggccctcggcgccggcaacggtgccctgttccagctcgtgcccctgcgctggccgaccaacaccgcggtcgccgggtcgatgatcggcgaggtcggggcgctcggcggcgcgatcctgcccaacgtcatgggcctgtcgaagcaatataccggctccttttcgctgggcttcatcggctacgcggtgttcaccgccgcggtgctcggctgcctgatgctctggcagcgcaaatgggtgggcagctgggtcggcccccgcggcaaggcgctgggcaccgagacggagaccgggcagctgcagccggccacggtctga

SEQ ID NO: 153 - DNA, 1251 bp, Methylobacterium radiotolerans
atggccagcttcaaaacggtgatgaagtcgggtcaccccccgacgctgttcgcggcattcctctacttcgatttctgtttcgccatctgggtcctgaacggcgccatggggccgttcatcaccgagaccttcaagctctcgccggcccagaccggcttcatgatctcgctgccgatcctcgccggagcgctgatgcgcttcccgctcggcgttctggcccagtatatcggccggaagaacgccgcgatcaccgagatgagcgtgatcatgctggcgatggcctacggctatctcttcgtctcctcctacaacgacgtcctcgccatgggcgtcctgctcggcatcgccggcgcgtccttcggcgtcgcgctgtccctcggctcgggctggttcccgccggagcacaaggggctggcgatgggcatcgcgggcgccggcaattccggcaccgtgctggccgtgctgttcgccccgccgctggcccaggcctacggctggcagaccacctacgccttcgcgggcgtcgtcatgctgctgcccctcgcgatcatgatcgtgctcgccaaggagccgccggactgcgagcaccagaccttcaaggagcacgtctcctgtctgttcaccaaggacggctgggcgttctcgctgatctacgtcatcaccttcggcggcttcatcggcctctcgaacttcctgccgaccttcttctacgagcagttcgcggtgacgaaggtcgaggccgggcgcctgaccatgctggcggccttcatgggctcgggcatccggatcgtcgggggctacttcgccgaccggatgggcgggatcgcggtcctgtcggtggtgctgctcgcggcgatcgccacgctgctgtcgctgaccgcgaccccctccctggcgctcacgacgctcctgttcatgctgtgcttcgcggccctcggggccggcaacggcgcgctgttccagctcgttccgctgcgctggccgaccaacacggccgtggccggctcgatgatcggcgagatcggggcgctgggcggcgcgatcctgccgaacgtcatgggcctgtccaagcagtataccggctcgttctcgctgggcttcgtcggctacgccgccttcacggcggtcgtcctcggctgcctcgcgctctggcagcggaagtgggtcgggagctgggtcgggccgcgcggcaaggcactcggcaccgcggccgaggccgagcagggccagctgcggcccgcgaccgcctga

SEQ ID NO: 154 - DNA, 1263 bp, Magnetospirillum magnetotacticum
atggcttccttcaagaccgtcatgaagtcgggtcaccccccgacgctgttcgcagccttcctgtatttcgatttctgcttcgcgatctgggtgctcaacggcgccatgggcccgttcatcacggagacctacaagctcaccccggcccagaccggcttcatgatctcgctgccgatcctggccggcgcgatcatgcgctttcccctcggagtgctggctcagtatatcggccgcaagaacgcggcgctcaccgagatgagcgtcatcgtcctggcgatggcctacggcttcttcttcgtctcgtcctacaacgacgtgctcgccatgggcgtgctgctcggcatcgccggcgcctccttcggcgtggcgctctccctcggttcgggctggtttccgccggagcacaaggggctggccatgggcatcgccggcgccggcaattcgggcaccgtgcttgccgtgctgttcgcgccgccgctggcccaggcctatggctggcaggcggtctacggcttcgccggcctcgtcatgatcgtgccgctcgtcgtgatgatcctgctcgccaaggagccgccggattgccacggccagtccttcaaggagcatgtctcctgcctgttcaccaaggacggctgggccttctccctgatctacatcatcacctttggcggcttcatcggcctctcgaacttcctgccgaccttcttctacgagcagttcagcgtgacgaaggtcgaggccgggcggctgaccatgctcgccgcgctgatgggctcgggcatccggatcctcggcggctatttcgccgaccggatgggcggcatcctcgtgctctccctggtgctgctcgccgccatcggctcgttcctggccctcaccgccacgccgtcgctcgccgtcaccacgctgctgttcatgctctgcttcgccgcgctcggtgccggcaacggtgccctgttccagctcgtgccgctgcggtggccgaccaacacggcggtggccggctcgatgatcggcgaggtcggggccctcggcggcgcgatcctgcccaacgtcatgggcttctcgaagcaatataccggcggcttcgccacgggcttcgtggtttacgccctcttcaccggtctggttctcggctgcctgttcctctggcagcgcaaatgggtcggcacctgggtgggcccccgcggcaaggtgctggatcccgcgggcgagacgctcggcgaggcggaaggcgcgcgcgtcgcccctgcgaccgcctga

SEQ ID NO: 155 - DNA, 1320 bp, Methylobacterium extorquens
atgagagaccgcgcccggctaaaagccagcggcgcgtcttcgagcccaacgagcacgccgatggcatccttcaagaccgtgatgaagtcgggccaccccccgaccctgttcgccgcgttcctctatttcgatttctgcttcgcgatctgggtgctcaacggcgccatgggcccgttcatcaccgagacctacggcctcaccccggcccagaccggcttcatgatctcgcttccgatcctggccggcgcgatcatgcgctttccgctcggaatcttggcccagtatattggccgcaagaacgcggcgctgacggagatgggcgtcatcgttctggcgatggcctacggcttcttcttcatttcctcctacaacgacgtgctcgccatgggcgtgctgctcggcatcgccggcgcctcgttcggcgtggcgctctcgctcggctcgggctggttcccgccggagcacaaggggctcgccatgggcatcgcgggcgccggcaattccggcaccgtgctcgccgtgctgttcgcgccgccgctggcccaggcctatggctggcaggcggtctacggctttgccggcctcgtgatgatcatcccgttcctcgtgatgatctttctcgccaaggagccgccggactgccacggccagaccttcaaggagcacgtctcctgcctgttcaccaaggacggctggtcgttctcgctgatctacatcatcaccttcgggggcttcatcggactgtcgaacttcctgccgaccttcttctacgagcagttcgcggtcacgaaggtcgaggccgggcgcctgacgatgctggcagccctgatgggttccggcatccgcatcctcggcggctactttgccgaccggatgggcggcatcctcgtcctctccctggtgctgctggccgcgatcggctcgttcctggcgctgaccgccacgccttcgctcgccgtgacgacgctgctgttcatgctctgcttcgccgcactcggcgcgggcaatggcgcgctgttccagctcgtgcccctgcgctggccgaccaacaccgcggtcgccggctcgatgatcggcgaggtcggggcgctcggcggcgcgatcctgcccaacgtcatgggcttttcgaaacaatacaccggcgggttcgccaccggcttcgtggcctacgccctgttcaccggcctcgtgctcggctgcctgttcctgtggcagcgcaagtgggtcggcgcctgggtcgggccccgcggcaaggtgctcgaccagccggccgaggcgcaggttcaggccggcggccgcatggaaccggccaacgcctaa

SEQ ID NO: 156 - DNA, 1260 bp, Methylobacterium populi
atggcttccttcaagaccgtgatgaagtcgggccaccccccgaccctgttcgccgccttcctctatttcgatttctgcttcgcgatctgggtgctgaacggtgccatgggcccgttcatcacggagacctacaagctgaccccggcccagaccggcttcatgatttcgctgccgatcctggcgggcgcgatcatgcgctttccgctcggcgtgctggcccagtatatcggccgcaagaacgcggcgctgacggagatgagcgtcatcgtgctggcgatggcctacggcttcttcttcgtctcctcctacaacgacgtgctggccatgggcgtgctgctcggcatcgccggcgcctcgttcggcgtggctttgtcgctcggctcgggctggttcccgccggagcacaaggggctcgcaatgggcatcgcgggcgccggcaattccggcaccgtgctcgccgtgctgttcgctccgccgctcgcccaggcctatggctggcaggcggtctacggcttcgccggcctcgtgatgatcgttccgatcctcgtcatgatcgtcctcgccaaggagccgccggactcccacaaccagaccttcagggagcacgtctcctgcctgttcaccaaggacggctgggccttctcgctgatctacatcatcaccttcggcggtttcatcggcctctcgaacttcctgccgaccttcttctacgagcagttcgcggtgacgaaggtcgaggccgggcgcctcaccatgctggccgccctgatgggctccggcatccgtatcctcggcggctacttcgccgaccggatgggcggcatcctcgttctctccctcgtgctgctggccgcgatcggctcgttcctggcgctcaccgcgacgccctcgctcgccgtgacgacgctgctgttcatgctctgcttcgccgccctcggggcgggcaacggcgcgctgttccagctcgtgccgctgcgctggccgaccaacacagcggtggccggctcgatgatcggcgaagtcggtgcgctcggcggcgccatcctgcccaacgtcatgggcttctcgaagcagcataccggcggcttcgcctcgggcttcgtcgtctacgccctgtttaccggcgcggtgctcgcctgcctgttcctgtggcaacgcaagtgggtcggcgcctgggtcggcccgcgcggcaaggtgctcgaccagccggcggaggcgaacgcccagggtgcgggccagatggagcctgcgcgggcctga

SEQ ID NO: 157 - DNA, 1257 bp, Methylobacterium sp.
atggccgatctcaagaccgtgatgaagtcggggcaccccctgacgctcttcgccgcgttcctctacttcgatttctgcttcgcgatctgggtgctgaacggcgcgatgggcccgttcatcaccgaggccttcaggctcaccccggcccagaccggcttcatgatctccctgccgatcctcgcgggggccgtcatgcgcttcccgctcggggtcctcgcccagtatatcggccgcaagaacgccgcgctgaccgagatgtcgctgatcatcctggcgatggcgtacggcttcttcgcggtgtcgagctacggcgacgtgctcgccatgggcgtgctgctcggcatcgcgggcgcctccttcggggtggcgctgtcgctcggctcgggctggttcccgccggagcacaagggcctcgccatgggcatcgcgggcgcgggcaattcgggcacggtgctcgcggtgctgttcgccccgccgctcgcccaggcctatggctggcaggcggtctacggcttcgccggcctggtcatggccgtgccgctcctcgtcatggtgatcctcgccaaggagcccccggaccgcgagcatcagagctttcgcgagcacgtcgcctgcctgttcgagaaggacggctgggccttcaacctgatctacgtgattacgttcggcggcttcatcgggctgtcgaatttcctgccgaccttcttctacgagcagttcgccgtgaccaaggtcgaggcgggccggctgaccatgctggcggcgctgatgggctcgggcatccgggtggcgggcggctacttcgccgaccggatcggcggcatcctggtgctgaccgtggtgctgctcgcggcggtcggctcgttcctgctcctcaccgcctcgccgccgctcctggcgaccacgatcctgttcatggtctgcttcgcggcgctcggggccgggaacggagcgctgttccagctcgtgccgctgcgctggccgaccaacaccgcggtggcgggctcgatgatcggcgagatcggagccctcggcggggcgatcctgccgaacgccatgggcctgtcgaagcaggtcacgggcggcttcgcggccggcttcgtcctctacgcagccttcgcggccgcggtgctcggctgcctggcgctgtggtcgcgccggtgggtcggacgctgggtcggcccgcgcggcaaggtgctgagcgccgagcccgcgcgggagggcggcgtcctggcggcgggcgcccagcgcgcctga

SEQ ID NO: 158 - DNA, 1440 bp, Burkholderia graminis
atgaatatctcgacagcacgcgcgcgggccggccgcacgctgaagatctggacacccgaagataaagcattctggcggcgcgaaggagaagccgttgcaaagcttaatctgtggatctcggtgcccgcgctctttttcgccttcgtcatctggcagatgtggagcgtggtggcggtgagcttgccgtcgcttggatttaactattcgaccaatcaactgttctggctggctgccgcgcccgcattgtccggcgcgacgttgcgcatcttctattcgttcatggtgccgatattcggcgggcgacgctggaccacgatctccaccgcgtcgctgttgattcccgcaatcggtatcggcttcgccgtgcaggacaacacgacgagctatccgacgatgctgctgcttgcgctgttatgcggcctcggtggcgccaacttcagttcgagcatggccaacatcagcttctttttcccgaaggaacgcaaaggttctgcgctcggcgtgaatggcgggcttggcaatctcggcgtgtcggcggtgcaattcctgtcgccgctcgtggtaacggcgggcatgctcggcatcttcggcggcgagccgcagacgctcgtcaaggccgggcacacgtcgcaagtgtggatgcagaatgcggcgtttatctgggtgccgtgtatcgtcatttcaacgcttgccgcatggttcggaatgaacgatctcgccgatgtgaaggcgtcgttcgctgcgcaggcaaccatctttaggagccgtcataactggctgatgtgcacgctgtatctcggcaccttcggctcgtttatcggctatgcagccggctttccattgcttatcaagagccagtttcccggcgtgaatccgctgacgtatgcatggcttgggccgttcgtcggtgcactcatcaggccgttcggcggatggctcgcggaccggctcggcggcgcgcgcgtgacgctgtggaatttcgtcgtgatggcgctcgcggtcgtcggcgttctgtactttctgccaaagacgggcggctcgtcgttctcgctcgcctggggtccgcgcgatggcagcttcacaggcttctttgcgatgttcctgctgctctttctcacgaccggcatcggcaacggttcgacgttccgcatgattccggtgatcttttcgaatctgcgcctgtgtggcgtgcccgcgggcgatgcgaatgcgctcgccgatgcgacacgtgaaggcagtaccgaaggcgcggccgcaattggttttgcaggcgcaatcggcgcgtacggcgggttctttattccgaagagttatggcagttccattctgatgaccggcggcccggaactcgcgttgtactgcttcgttgttttctatttgctgtgtattgggcttacgtggtggttctacgcgcggcgcaatgcgggcatgccgtgttaa

SEQ ID NO: 159 - DNA, 1464 bp, Acidovorax citrulli
atgcctgccaccccttcttcctcttcttcctctccctcccgcggcggtgcccgggccgggcgcgtgctgaccctgtggaccccggaggacaaggagttctgggaacgcgaaggcgaagccatcgcgcgcctgaacctgtggatctcggtgcccgcgctgttcctgtccttcgccatctggcaggtctggagcgtggtcgccgtgagcctgccggcgctgggcttccgctattccaccaaccagctcttctggctggcggcggcgcccgcgctctcgggtgccacgctgcgcatcttctactcgttcatggtgcccctggtgggcgggcgccgctggacggcgatctccaccgcgtcgctgctggtcccggccctcggcatcggcttcgcggtgcaggacagcacgacggcctacccgacgatgctggcgctcgcgctgctgtgcggcctgggcggcggcaatttcagctccagcatggccaacatcagcttcttcttcccgaaggagcgcaagggttcggcgctgggcgtgaacgcggggctgggcaacctgggcgtgtcggtggtgcagttcctgagcccgctggtgatcacggccggcgtgttcggcgtgctgggcggcgatgcgcagacgatggtgaagaacggccaggcgcagcaggtgtgggcgcagaacgcggccttcgtctgggtgccctggatcgcgctcgcgtcgctggccgcatggttcggcatgaacgacatcgccgacgcgcgcgcctcgttcgcggcccaggccgccatcttccgccgcaagcacaactggatcatgtgcgtgctgtacctgggcaccttcggctcgttcatcggcttttccgcgggctttccgctgctcatcaagagccagttccccgaggtgaatccgctcgcctacgcatggctcgggccgctggtgggcgcgctgatccggcccgtgggcggatggctgtcggacaagctgggcggcgcgcgggtcacgctgtggaacttcgtggcgatggccctggccgtgctgggcgtgctggccttcctgcccaagggcacgggtggctacgcgctcgccttcgggccggcgcagggcagcttcgcgggcttcttcgcgatgttcatggtgctgttcctgacgaccggcatcggcaacggatcgaccttccggatgatccccgtgatcttcctgaacctgcgcctggccgaagtacgcacgggcggcgccggggcccgcgcccaggccacccgcgagggcaacaccgaaggcgccgcggccctgggcttcgcgggcgcgctgggcgcctacggcggcttcttcatccccaagagctacggcagctccatcgccgcgacgggggggccggaactggcgctgtgggcgttcgccgcgttctacgcgctctgcatcggcatcacctggtggtactacgcgcgccgccatgcagagatgccgtgttga

SEQ ID NO: 160 - DNA, 1461 bp, Delftia sp.
atgcatgcgaacaccaagaccgccgcaaaggcatccgcgcgcagccgccccggcagcgtgctgaccctctggcgccccgaggacaaacagttctgggagcgcgagggcgaggccatcgccaggatcaatctctggatctcggtgcccgccctgttcctggcctttgccatctggcaggtctggagcgtggtggccgtgaacctgcccgcgctgggcttcacctactccaccaaccagctgttctggctggcggccgcgcccgcgctgtcgggcgccacgctgcgcatcttctattccttcatggtgccgctgatgggcgggcgccgctggacggcgctgtccacggcctcgctgctgatcccggccatcggcatcggctacgccgtgcaggatgccagcaccggctatccgaccatgctgatcctggccctgctgtgcggcctgggcgggggcaacttcagctccagcatggccaacatcagcttcttctttcccaaggagcgcaagggctcggccctgggcgtgaacgcgggcctgggcaacctgggcgtgtcggtggtgcagttcctgagcccgctggtgatcacggccggcatcttcggcgtcttcggcggcgatgcgcagaccatcaccaaggccggcgagaccacccgggtgtgggcgcagaacgcggccttcatctgggtgccgtggatcgccatcgcctcgctggccgcctggttcggcatgaacgacatcgccgacgccaaggccagcttcgcggcccaggccgccatcttccggcgcaagcacaactgggtgatgtgcctgctgtacctgggcaccttcggctcgttcatcggctttgccgccggctttccgctgctgatcaagagccagttcccggcggtcaatccgctggcctatgcctggctgggcccgctgctgggcgcgctgtcgcggccctttggcggctggctggccgacaaggcgggcggcgcgcgcgtgacgttctggaacttcctcgtcatggccgtggccgtggtgggcgtgctgtatttcctgcccaagggcagcggcggctacgcgctgggcttcggccctgccgagggcagcttcatgggcttcttcctgatgttcctggtgctgttcctgaccacgggcatcggcaacggatcgaccttcagcatgatcccggcgattttcctggcgctcaagcagcgcgaactgggcgcccatcccagcgagcaagcgcaggcccatgccctcaaggagggcaataccgaaggcgcggccgccctgggctttgcgggcgcgctgggagcctacggcggcttcttcatccccaagagctacggcagctccatcgccgccacgggcgggcccgagctggcgctgtgggtgtttgccgccttctatgtgctgtgcgtgggcgtgacctggtggtactacgcgcgcaggaacgccgagatgccctgctga

SEQ ID NO: 161 - DNA, 1446 bp, Acidovorax sp.
atgtccaacaacaacgtttcgcagggcagcggccgcaaaggccgggtgctcacgctctggactcccgaggacaagaccttctgggcgcgagagggcgaggcggtcgccaagatcaacctctggatctcggtgcccgcgctgttcctggctttcgccatctggcaggtctggagcgtggtcgcagtcaacctgccgggcctgggcttcaagtactcgaccaaccagctgttctggctggcggcggcgccggcgctttcgggcgccacgctgcgcatcttctactccttcatggtgcccgtcttcggcggccgccgctggactgcgctgtccaccgcgtcgctgctgatccccgccatcggcatcggctatgcggtgcaggacaacaccaccagctaccccaccatgcttttgttggcgctgctgtgcggcctgggcggcggcaacttcagctccagcatggccaacatcagcttcttcttcccgaaggagcgcaagggttccgcgctgggtgtgaacgccggcctgggcaacctgggggtgtcggtggtgcagttcctgagcccgctggtcattacggcaggcatcttcggtatctttggcggggagccccagaccatcgtgaagaatggccaggagcagatggtgtgggcgcagaacgccgccttcatctgggtgccctggatcgcactggccgcggtggcggcgtggttcggcatgaacgacattgccgatgcgcgtgccagcttcgccgcgcaggcggccatcttcaagcgcaagcacaactggatcatgtgcgtgctgtacctgggcaccttcggttcgttcatcggatttgccgcaggctttccgctgctgatcaaggcgctcttccctgaagtcaaccccctggcctacgcctggctgggtccgctggtgggcgccgtggtgcgtccgctcggtggctggttggccgacaaggtgggcggtgcccgggtcacggtctggagcttcctcgtcatggcgctggccgtggtgggtgttctgtttttcctgcccaagggctcgggcggttttgcgctgccctttggcccggctgaaggcagcttcacgggctttttcctgatgttcctggtgctcttcttcaccaccggcatcggcaacggctccaccttccgcatgatccccgtgatatttctgacccagaagctgcgcgagttgcgcaccgatgacgaagcatcgcgcgcccaagccatcaaggatggcaacaccgaaggcgcggccgcggtgggcttcgccggagcgctgggcgcctacgggggctttttcattcccaagagctatggcagctccatcgccgcgacgggcggtcccgaattcgcgctgtggatgtttgccgttttctatgttctctgcatcatcatcacttggtggtactactctcgcaagcatgcagagatgccctgctga

SEQ ID NO: 162 - DNA, 1446 bp, Alicycliphilus denitrificans
atgtctgccaattccgctacgcaacgggacagccgcgccggccggctgctcacgctctggacccccgaggacaagcagttctgggaacgcgagggcgaggccgtggccaagctcaacctgtggatctcggtgcccgcgctgttcctggccttcgccatctggcaggtctggagcgtggtcgccgtgaacctgccggccctgggcttcaagtactcgaccaaccagctgttctggctggccgcggcgcccgcgctgtcgggcgccacgctgcgcatcttctattccttcatggtgccggtgttcggcgggcggcgctggacggcgctgtccacggcctcgctgctgatcccggccatcggcatcggctacgcggtgcaggacaacaccaccggctaccccaccatgctggtgctggcgctgctgtgcggcctgggcgggggcaacttcagctccagcatggccaacatcagcttcttcttcccgaaggagcgcaagggctcggccctgggcgtgaacgccggcctgggcaacctgggcgtgtccgtggtgcagttcctgagcccgctggtcatcaccgcgggcgtgttcggcgtcttcggcggcgactcgcagaccatcgtgaagaacggcgagcacgtgcaggtgtgggcgcagaacgcggctttcatctgggtgccgtggatcgccatcgcctcggtggccgcctggttcggcatgcacgacatcgccgacgccaaggccagcttcgccgcgcaggccgcgatctttcgcgccaagcacaactggatcatgtgctggctgtacctgggcaccttcggttccttcatcggctttgccgccggcttcccgctgctcatcaagagccagttccccgacgtgaacccgctggcctacgcctggctggggccgctgctgggcgccctgatccggcccttcggcggctggctgtcggacaaggtgggcggcggcgtggtcaccttctggaacttcatcgtcatggcgctggccgtgctcggcgtgctgttcttcctgcccaaggggatgagcgcctatgccttccccttcggtccggcgcagggcagcttcacgggcttcttcctgatgttcctggtgctgttctgcaccaccggcatcggcaatggatcgaccttccgcatgatccccgtgatcttcctgaaccagaagctgcgcctgctgcgcggcaacgacgaggccgcgcaggcccaggccatcaaggacggcaataccgagggcgcggccgccgttggtttcgccggcgcgctcggggcctatggcggtttcttcattcccaagagctatggcagctctatcgcggccacgggtggacccgagttcgcgttatggatgtttgctgttttctatgtcgcctgtatcgttatcacttggtggtattactcgcgcaagaacgccgagatgccttgctga

SEQ ID NO: 163 - DNA, 1446 bp, Xenopus tropicalis
atgtcaacccctgccgcatcgcatgctggcgcccgccagggtcgcctgctcacgctctggacgcccgaggacaagcagttctggcagcgcgagggcgaggccgtcgccaagctcaacctgtggatctcggtgcccgcgctgtttctggccttcgccatctggcaggtctggagcgtggttgcggtgaatctgcccgcgttgggcttcaagtactcgaccaaccagctgttctggctggccgccgcgcctgcgctctcgggcgccacgctgcgcatcttctactcgttcatggtgccggtgttcggggggcggcgctggacggcgctgtccaccgcgtcgctgctgattccggccatcggcatcggctatgcggtgcaggacaacaccaccagctaccccaccatgctcattctggcgctgctgtgcgggctgggcgggggcaacttcagctccagcatggccaacatcagcttcttcttcccgaaggagcgcaagggctcggcgctgggtgtgaacgcgggcctgggcaatctgggcgtgtcggtggtgcagttcctcagccccttggtcatcacggctggcatcttcggcattttcggcggcgaggcgcagagcatcgtgaagaacggcgagcacacgcaggtgtgggcgcagaacgcggccttcatctgggtgccgtggatcgccatcgcgtcggtcgccgcctggttcggcatgcacgacattgccgatgcccgggccagctttgccgcgcaggccgctatctttcgcgccaagcacaactgggtcatgtgcctgctgtatctgggtacgttcggctccttcatcggctttgcggcgggttttccgctgctcatcaaggcgctgttccccgaagtcaacccgctggcctacgcctggctcaggccgctggtgggcgcggtgatccggcccttcagtggctggctggccgacaaggtgggcggtggcgtggtgacgttctggaacttcatcgtcatggccctggccgtgctcggcgtgctgtatttcgtgcccaagggcacggggggttacgccatgcctttcgggccggccgagggcagttttgcgggcttcttcatcatgttcctggtgctgttcctcaccaccggtattggcaacggttcgaccttccgcatgatccccgtgatctttctcacgcagaagctgcgtgagctgggcgacaacgacgaagccaccaaggcccaggccatcaaggaaggcaataccgagggcgccgccgccgtgggcttcgcgggcgcgctcggggcctatggggggttcttcatccccaagagctacggtagctccatcgccgccacgggcgggccggagttcgcgctgtggctgtttgccgtgttctacgcgctgtgtgtggtggttacctggtggtactacgcacgcaggaacgctgatatgccgtgttga

SEQ ID NO: 164 - DNA, 1410 bp, Acidovorax sp.
atgtctgccatcaccaccagcgggcgccaggggcgtcttctcaccctctgggccccggaggacaaatcgttctgggagcgcgaaggcgaagccattgccaagctcaacctctggatctcggtgcccgcgctgttcctggcctttgccatctggcaggtctggagcgtggttgccgtgagcctgcccggcctcggcttcaagtactcgaccaaccagctgttctggctggcggccgcgcccgcactctcgggcgccacgctgcgcatcttctattcgttcatggtgccgctggtcggtggccgccgctggacggcgatctccaccgcctcgctgctgattccggcgctgggcatcggctttgcggtgcaggacaacactacagcctaccccaccatgctcatcctggcgctgctgtgtggcctgggtggtggcaacttcagctccagcatggccaacatcagcttcttctttccgaaggagcgcaaggggtcggcgctgggtgtgaacgcgggcctgggcaacctgggcgtgtcggtggtgcagttcctgagccctctggtcgtcacggccggcatctttggagtttttgggggtgatgcccagaccatcgtcaagaacggccagaccgcacaggtctggacgcagaacgccgctttcatctgggtgccatggattgcgctgaccgcgctggcggcttggtttggcatgaacgatattgccgacgcgcgcgcttcgttcgctgcgcaggccgccattttcaagcgcaagcacaactggctgatgtgtgtgctgtacctcggcaccttcggctcgttcatcggctacgccgcaggctttccgctgctcatcaagagccagtttcccagcatcaaccccctggcctacgcctggctggggccgctggtgggtgcagtggtgcggccctttgggggctggctggccgacaagctcggcggtgctcgcgtcacgctgtggaacttcatcgtgatggccatcgccgtggtcggtgtgacggtgttcctgccatcgggcggtaacgagggccagttcgccggcttctttgtgtgcttcctggtgcttttcctcaccaccggcatcggcaacggctccaccttccgcatgatccccgtgatcttcctgaccgaagccatgcgcggcgtggaccccctcaacacggccgctgtggcccaggccaacaaggaaggcaacaccctgggtgccgccacgctgggtttcaccgctgccatggcggcctacggcgggttctttattccaaagagctacggcagctccatcgcgctgaccggcagcccccacgccgcgctgtggacgttcttcgccttctacctcgtatgcatcgtgatcacctggtggcactacgcgcgcaagaacgccgccatgccttgctga

SEQ ID NO: 165 - DNA, 1416 bp, Acidovorax delafieldii
atgtctgccaaccaactcagcagcggcgagcgccaggggcgcacgctcactatctggactccggaggacaaatcattctgggagcgcgagggtgaggctgtcgccaagctcaatctgtggatctcggtgcctgcgctgttcctggcctttgccatctggcaggtctggagcgtggtggccgtgagtctgccggggctgggattcaagtactccaccaaccagctcttctggctggccgcggcacctgccctcagcggcgccacactgcgtatcttctattcgttcatggtgccgctcgtgggtggccgccgctggacggccatctccacggccaccctgttgatacccgccatcggcattggctacgcggtgcaggacaacaccaccggctacccgacgatgctgatgcttgcgctgctgtgcggcctgggcggcggcaacttcagttcgagcatggccaacatcagctttttctttccgaaagagcgcaagggctcggcgctgggggtgaatgccggcctgggaaacctgggtgtttcggtggtgcagttcctgagcccgctggtcgtcacggctggcatcttcggtatctttgggggcgatccgcagacgatcgtgaagaatggccaatcggcgcaggtgtggacgcagaacgcggccttcatctgggtgccatggatcgcgttggcatcgctggcggcctggttcggcatgaacgacattgccgatgcaaaagcctccttcgccacgcaagccgccattttccgccgcaagcacaactggttgatgtgcgtgctgtacctgggcacgttcggctccttcatcggctatgccgctggttttcctttgctgatcaagagccagtttcctggcgtcaacccactggcctacgcatggcttggtccgctggtgggcgcggttgtgcggcccttcggtggctggctggccgacaagcttggcggcgcacgcgtcacgctgtggaacttcgtcgtcatggcgctggccgtggtgggggtcattggcttcctgccctcgggcggctcggcagggcagttctcgggattcttcgtgtgctttctggtgctgttcctgaccaccggcatcggcaacggctcgacgttccgcatgattccggtgatcttcctgactgaagccctgcgcggtgtcgatcgcaacaacgcggccgctgtggcacaggccaccaaggagggcaacacgctgggcgctgccacgctgggcttcacggccgcaatggccgcctacgggggcttcttcattcccaagagctacggcagctccattgcactgaccggcggccccgaggcagcgctctggaccttcgttgccttctacgtcatctgcattgtgatcacctggtggtactacgcccgcaagcacgcagagatgccttgctga

SEQ ID NO: 166 - DNA, 1410 bp, Burkholderia sp.
atgaactcccggcccctcacagcgcggccaggtcgcacgctcgcgatctggtctcccgaagacaaggccttctgggaacgcgaaggcgaagcgattgccaggctcaacctgtggatctcggtccccgcgttgttcctcgcattcgcaatctggcaggtgtggagcgtcgtggcggtgaatctgccggcgctcggctttcgctactcgacgaaccagttgttctggctcgcggcggcgcccgcgctgagcggcgcgacactgcgcatcttctattcgttcatggtgccgctcgtgggcggccgccgctggacggccatttcgactgcctcgctgctgattcccgccattggtatcggttttgcggtgcaagacaacaccacgacctatcccacgatgctcgcgctcgcgctgctgtgcggcctgggcggcggcaatttcagttcgagcatggccaacatcagcttcttctttccgaaggagcgcaaggggtcggcgctcggcgtgaatgcgggactcggcaacctgggcgtttctgtcgtgcagttcctgagcccgctcgtcgtgacagcaggcattttcggcatctttgcgggcgagcctcaaagcgtcgtgaaggccgggcagaccacgctcgtatggacgcagaatgcggccttcatctgggtgccgtggattgcgttggcgtcgctcgccgcctggttcggcatgaatgaccttgcggaagccaaggcatcgttcgccgagcaggctgtgatcttccggcgcaagcacaactggctgatgtgcgtgctttacctcggcaccttcggctcgttcatcggctatgccgcgggtttcccgctgctcatcaagagccagtttccggctgtcaatccgctcgcttatgcctggctgggaccgctcgtcggcgccgcggtgcggccgttcggcggatggcttgccgacaagctgggcggcgcgcgcgtcacgctgtggaatttcgtggtcatggcatgtgccgtgggcggcgtgctgatgttcctgcccaacggttcttcggcgggcagcttcggcggcttcttcgcatgctttctcgtgctgttcctcacgacaggcatcggcaacggctcgacgttccgcatgatccccgtgatctttctcaactcgaagctgcgcgaagtcaacccgtcagaccgcgaagccgtgcagcgcgcaaccagggaaggcaacaccgaagccgcggccaccttgggtttttctgcagcgatggcggcctacggcggcttcttcattcccaagagctacggcagctccattgccctcaccggcggccctcaagccgcgctgtacgtgttcattgctttttacctcgtgtgcatcgccgtgacctggtggcactacgcccgccgcaacgcacccatgccctgctga

SEQ ID NO: 167 - protein, 451 aa, Rhizobium sp.
MRGKQAPDGAFFYARNSGDASSDFPRHPTGKTVKTMTDNNPIRTPRTRATENTATAAAAPRLTTLIFLSALSVLPVNMILPSLPRIAGEFHADYALVNLSVAGYTIVTALIEIVAGAMSDRYGRRPVALTAVSIFIVASMGCALATNIGTFLVFRAMQASIGACFSVALVVVKETSGERGTASRIGYVSMGWAIAPMVGPMFGGLLDELFGWRAIFVVLAILGVAVLALSMRELRETSTRASRPKTHYLASYAQLLSSARFWAYTLCMACSMGTLYIFLGGAPLAFNHSLSGSSAILGFYMGMVPAGFILGSYLAGRYASRNALSTVLIVARLFTCIGLLAGLVLVMSGTAHVLAFFGPRMFIGIGNGLTMPAGNTGVLSVRPDLAGTAAGLSAAMRLAGGALIGSVAGLFLARSGTIHALFVMMLVSALLALFAAFYAAFVDRHISKPVT

SEQ ID NO: 168 - protein, 408 aa, Burkholderia phytofirmans
MGDKFSRAQKTAVIAGLFLAWAVGYADRILMSVALVPISKEFMLTAQEGGMLLSAFYFSYAIMQLAGGWLSDKFGSRIVVVACVVMWSIFTGVTSLGWSFASLLVIRFMFGLGEGSFSPASSVTVAEVFPKKQRARAKSFLVSTTFLGSAVGSAIIAASVTKLGWRGAFDILSVVGFAVAVILWFSLRGDKRARQKTDVERPRVAWKPVLQSPLAWKLTAVWFFTSALHVGVNSWMPTYLMTSYHISLKHAGLALVVPNLIAFAGANTVGFFLDKLDKRFEKGCLVAGSALSTVFLVLMITTTQIWLLLTYWTLFSLSFNLVYATVFATPLRRVPEQLIGKTSGLMNFGGQLANSIFPAIMGALITAANGAFFSAFYLLIGVGVLSVVAALVFKVPNETNSSLELAIN

SEQ ID NO: 169 - protein, 423 aa, Bacillus subtilis
MVVYEWQCSTTCGGADKVPMTYIQKGTPVFRKITFAFFAAGFNTFAILYCVQPLMEEFTREFHVTPTAASLSLSVTTMLLAVSMLVFGSLSEVWGRKPIMAVSMLAASVLCLASSFSPNFHTLLVLRTIQGVALAGLPSIAMAYLGEEIEPGSLGSAMGLYISGNAIGAVFGRIVSGLLSEFFNWHMAMGAIGVISLIASIIFFMNLPPSRHFTPRKLELGQLGISLISHLKDRKLLSLFLIGFLLLGSNVALFNYIAYVLLEPPYSFNKAIVSWIFIVMIVGIFSSSFIGRMVDQYGYPKILMMNIFIVIAGALLTINSMLAVKILGIALFTFGFFGGHSVASSWVGRRALHNKAQASSLYLFFYYAGSSICGTVGGLFWSAFHWLGVVGMIVIMLLVAFGLSGYLARSVKMPDKSNEKGLD

SEQ ID NO: 170 - protein, 434 aa, Yersinia ruckeri
MMRKIKGLRWYMIALVTLGTILGYLTRNAIAVAAPTLQEQLHITTQQYSYIIAAYSAAYTLMQPVAGYVLDVMGTKVGYAMFAVMWAIFCMSTALASSWGGLAIARGAVGAAEAAMIPAGLKASSEWFPAKERSIAVGYFNVGSSIGGMIAPPLVVWAIVMHSWQMAFVLTGILSLIWAICWLIFYKHPKDQKRLTDEERDYILNGQEAHHSVANAKKMSAMQIIRNRQFWGIAIPRFLAEPAWGTFNAWIPLFMFKAYGFNLKEIAMFAWMPMLFADLGCILGGYLPPLFQKHFKVNLIVSRKLVVTMGGLLMIAPGTIGLFTSPYVAIALLCIGGFAHQSLSGALITLSSDVFGRNEVATANGLTGMAAWTASTLFALVVGALADTLGFSPLFAALAVFDVLAVIVIWTVLQNRTADDSHIDPIQQAPAEQN

SEQ ID NO: 171 - protein, 501 aa, Xanthomonas campestris
MVALSPVAQCHPRAGAVVDESNRRTYGHRATFTALPHCAQGQRVQGIGMLPLRAAAAVHVVSELPVNAAATGPLARLGRMRWRVCALLLAATTINYVDRQVLGVLAPFLQTQIGWNEIQYGYIVTAFQAAYALGLLCSGAVIDRFGTRAGYALAIGIWSLAAMGHALATTVVGFAIARFFLGLGESGNFPAAIKTVAEWFPRRERALATGIFNSGSNIGAIVAPLLVPVIATAWGWQAAFLFTGVLSATWLVVWWCSYHPPEQQPGLTAAELAHIRSDAHEPVQRRLSWLQVMRHRQAWAFVLGKFITDPIWWFFLFWLPKFLHAEYGLSLLQLGAPLIVIFVLADIGSIAGGWVAGRFIARGWSVNRARKTAMLICALSVVPIVFAASADNLWVAVGLIGLATAAHQGWSANLFTLPSDMFPRHAVATVVGIGGFAGAVGGMLIATFIGFLLQATGSYVPVFLMAGSAYLLALAIVHHLVPRLEPAQLPADAPAPPATHP

SEQ ID NO: 172 - protein, 437 aa, Sorangium cellulosum
MRKMRWVVLFLCFLAVAINYIDRANLAVAAPQIEKELGIGPAQMGFIMSGFFWTYALMQMPFGWFVDRVGARVALPIAVGWWSLFTAATAGASSVAAMFGCRLLLGVGEAGAYPACAKLVSQWFKPRERALATGIFDSGARVGSALSIPLVALIIDTLGWKAAFIITGLFGAVWILGWVVIYRSPAHGDMTGEKDVVHAAPAEDAQNSVTWASLFRHRTLWGMMLGFFCLNFTNYFFITWFPSYLVQTRGFSLKSLGTLGMIPALMAIPGGWIGGFVSDALYRRGWSLTAARKTCMVGGMLVSSAITLSALTSNIYLMLAFFGISYASLAFAGASIWSLPGDVAPTPRHVASISGIQNFASNLAGIVITTFTGVMLSLTKGSFTIPLVVAGGFCLLGAFSYLVIVGKIEPLQVRSAPIAARSPSLEFDRDSSPTSAG

SEQ ID NO: 173 - protein, 460 aa, Burkholderia xenovorans
METRIRRVKTRHIILAVMCLMYFISYIDRVNIAVAGPLIRHEMGLTTVQLGLVFSAFAYPYAAMQIIGGWLADKFGPKLVLTVLSLIWGVATLATGFAGSVTMLVLMRFALGVGEGGAFPTATRAFTYWMPVAERGFAQGITHSFARLGGAVTPPLVLAVVATGGWRDAFILLGIASLAWTVLYLFVFTNSPEQNRRITPEETAEIGYRAGDCDRAKHAATPWRKLVRRMWLVTFVDFCYGWLLWVYLTWLPSYLRESRGFDLKQLALFTALPLLAGVVGDTLGGVVSDKLYKITGRLRFARCAVLVVGMGGSLVFLLPMVSATDPLTAVWFLSASFFFLEITNPVLWTLPLDIAGKYAGTAGGMMNTGFGVAGMISPVAFGFLIEKTGSYNVPFNISAGLLAVGIVAALFIDTGKTVEADEERERAAGAELGGMPSFLHAGAAVRLERHHLRRPLRWRK

SEQ ID NO: 174 - protein, 514 aa, Metarhizium acridum
MGFNISLLWKTPMVDPINKKARSIPVLNVVDPYGRVFFFSWMGFMLGFWAWYTFPPLLTVTIKKDLHLSAAEVANSNIVSLCATLLLRFVAGPLCDQFGSRRVYASLLLLGCLPVGLAPLVKTANGLYVSRFFIGILGATFVPCQVWCTGFFDKNIVGTANALSGGWGNAGGGITYFIMPAVFDSLVASQGMAPSKAWRVTFVVPLICLIACALGMLFLCPDTPLGSWEERSQKLQENLDQYSPTSTTAVNTPHILSEPPSRDVEKAEEFDEDSKFYKQPSAISLSEAVAIAQAETVVKPSFKDSLPVMLSLQTLFHVATYSCSFGGELAVNSILSSYYKANFPHLDQTKASNYAAIFGFLNFVTRPLGGVVADILYRMSGQNLWTKKAWITMAGLLSGALLIIVGKVDPSEANGRDIGTMVGLVTVAAFFIEAGNGANFALVPHVYPAANGVLSGCTGGGGNLGGVVFAIIFRFIDHGSGYATACWVIGVIHIAVNLAVCRIPPLPKGQVGGQ

SEQ ID NO: 175 - protein, 532 aa, Ricinus communis
MASTEEMSPGSSMHGVSGKEQTFAFSVTNDPEIPTDTTAKFSLPVDSEHKAKVFNLLSLANPHMTTFHLSWLSFFTCFVSTFAAAPLVPIIRDNLNLTKKDIGNAGIASVSGSIFSRLVMGAACDLLGPRYACAFLIMLSAPTVFCMTFVSSAGGYVAVRFMIGFSLATFVSCQFWMSTMFNGKIIGVVNGTAAGWGNMGGGATQLLMPLLYELIKRAGATPFTAWRIAFFIPGWLHVIMGILVLSLGQDLPDGNLSTLQKKGDVPKDKFSKVLWYAITNYRTWVFFLLYGMSLGVELTTDNVIAEYFFDRFDLKLRTAGTIAAIFGMANIFARPMGGLMSDIAARRFGMRGRLWNLYILQTLGGIFCICLGRVSSLPLSVLFMILFSLGAQAACGATFGIIPFISRRSLGIISGLTGAGGNFGSGLTQLLFFTSSTYTTATGLSLMGIMIVACTLPVTLVHFPQWGSMFLPATKNVEKCSEEYYYASEWNQEEKEKGLHQGSLKFAENSRSERGRRVASAATPPSSTAANL

SEQ ID NO: 176 - protein, 466 aa, Acinetobacter sp.
MSSNINLDAKKATEIKLFSFSTPAMRAFHMTWLAFFVCFFAWFACAPLMPVIKGEFGLTKDQIANINIAAVAITILVRLAVGPLCDKYGPRITYTTLLLLGSIPVFGVAAANSYESFLFFRLLIGAIGASFVITQYHTSIMFAPNVVGTANAAAAGWGNAGGGATQALMPLLLGAIVMFGVEQTMGWRVALIVPGVMMVIVGVLYWKLTQDCPQGNFKEVRAQGIEVGSGKKGGMAILMQAARNYRVWILFLAYGACFGIEIFIHNVAAMYYVDQFKMDLKTAGLTAGIFGLLALFARALGGIISDKVALKKGLDGRTKVLVLMILGEGLFLILFSQMNVVALAIISMTVFALFTHMACGATYALVPFIDRNALGGVAGIIGAGGNVGAVAAGFLLKGVLDIQTCLFILGGLVMVAGCSVILIRFTTEHKEKEKILLNKLYLNAIQQLNSDKKQKSQMIFASSPFS

SEQ ID NO: 177 - protein, 429 aa, Streptomyces flavogriseus
MGRLRCAASSNGSTRRAPPSPSLLTCGVETTAAQSPAPVRREAAAFRNLITATVGFTLTFWAWNLVSPLSGAFKDRLDLSSFQQSLLVAVPVLVGSLGRVPAGALTDRFGAKLMFPLVSALTVVPVLLLIPAKDNYAAMLAVGFLLGLGGTTFAIGIPLVNSWFPPAKRGLALGIFGMGMGGVALSGYFTPRIAEHDVNLPFWIVAGALLVYSLLAAVLITDHPDRKVPEDSLGHRLGQAGRLRVTWELSALYAIGFGGIVAFGVYLPTYLKTWYEMSPTEAGTKAAGFALVTVVFRPVGGWLSDRIHPALVTAAALLLAALMAVVQAFDPPLYPLGTIALLAMAAGLGTASGSVFALVSQVTPQAAVGSVTGIVGAMGGLGGFVPPLVMGAIYSAKSSYSIGFMLLSDLALAGAVYAYGRMRTLRRDG

SEQ ID NO: 178 - protein, 418 aa, Mycobacterium gilvum
MEVVGQTCLSGRVSTATTPDIGARRGLNLALATWVSAINFWAWNMIGPLSTTYAGDMSLSSSQASVLVATPILVGALGRIVVGPLTDRFGGRVMFIGVTVASIVPVLAVGVAGTQGSYPLLVVFGLFLGIAGTVFAVGIPFANHWYDASRRGFATGVFGMGMVGTAMSAFFTPRFVNWFGLFTTHVIIAVALALTAVLCLVVMRDSPQFTPNHDAVMPKLRAAAKLPVTWEMSFLYAVVFGGFVAFSNYLPTYIKTIYDFSAVDAGARTAAFALAAVLARPVGGMLADRIPPKYVVLGSFAGTAAAAFVAIFQPPPDLWSAVTFITLALFLGIGTGGVFAWVARRAPASSVGSVTGIVAAAGGLGGYFPPLVMGGTYDSVDNDYTIGLSLLVATALIALLYTALRLHAHEPKPTQEVR

SEQ ID NO: 179 - protein, 500 aa, Bacillus sp.
MKTQKLQLPLQTASLVVGFMVWVILSSLMSSIKQDIPLTANQTAMVTAVPVILGSLLRILLGFWTNRYGARWLFFIGFVILVLPIFYISIADSMFDLILGGLVLGIGGALFSIGVTSLPKYYPKERHGFVNGIYGAGNIGTAITSFAAPALAVNIGWQSTVRLFLIPVILFALLNFLLGDRDEPKVNKPLSEQIKSVYKNEKLWFISLFYFVTFGSFVAFTVYLPNFLVTYFGLTTVDAGLRTAGFITLATLMRPIGGWLGDKFNPYLILFIVFNVITFAGVLLAFTPDIVLYTIGCLLVSLCAGIGNGTIFKLVPYYFSKQAGIVNGIVSAMGGLGGFFPPIVLSIVFGMTGHYAIGFMSLAMFALLSSVFVVWMFYTEKIQLEAKLIENVAQGMMVTNPKGVIQKVNHAFTTVTGFEPDEAIGKTPSILRSGKHDSAFYDQMWDSIRSKGYWQGEIWNRRKNKELYREWLTISEVKNEVGEVKYYVGLFNDLTEKQDT

SEQ ID NO: 180 - protein, 411 aa, Pseudomonas putida
MYYRVRCSMSASFWKSGHVPTLFAAFLYFDLSFMVWYLLGPLAVQIAADLQLSAQQRGLMVATPILAGAILRFAMGVLVDRLSPKTAGLIGQVVVIVALAAAWHLGVHSYEQALLLGVFLGFAGASFAVSLPLASQWYPPQHQGKAMGIAGAGNSGTVFAALLAPALAAGFGWNNVFGFALIPLSLALVVFALLARNAPQRPKPKAMADYLKALGDRDSWWFMFFYSVTFGGFIGLASALPGYFSDQYGLSPVTAGYYTAACVFAGSLMRPLGGALADRFGGIRTLLGMYGVAAICIAAVGFNLPSAAAALALFVSAMLGLGAGNGAVFQLVPQRFRQEIGVMTGLIGMAGGIGGFLLAAGLGTIKQHTGDYQLGLWLFASLGLLAWFGLHGVKQRWRTTWGSAAVTAARV

SEQ ID NO: 181 - protein, 484 aa, Mycobacterium rhodesiae
MQTSTTRRGYDIDDWDAEDVEAWNNGGSKIARRNLIWSIFAEHVGFSVWSIWSVMVLFMPQNVYHIDAAGKFFLVAVPTLVGAVLRIPYTFATAHFGGRNWTIFSALVLLVPTALTLYFMAHPGASYTTFLVVAAFAGLGGGNFASSMTNINAFYPQRYKGWALGLNAGGGNIGVAVIQLVGLLVIATVGNRSPHLVCAVYLVLIALAALGAAVSMNNLTNQRSDARSLIEVLAHRDSWLISLLYIGTFGSFIGFGFAFGQVLQINFLAGLSHGGPVTPAMTAQASLHAAQIAFLGPVLGSLSRPFGGWLSDRFGGGKVTLYTFGAMIAAAAWLVAAGEIDDAAAGPASGATMAAFIAGFIALFVLSGMGNGSTYKMIPSIFEAKSKSLEHLSAQERSAWSLRMSGALIGIAGAIGALGGVGVNVALRASYLSPAKSATMAFWVFLGFYVLCAIITWVAYVRTPKKVGVLRTDNPAVDNAAATA

SEQ ID NO: 182 - protein, 461 aa, Streptomyces turgidiscabies
MTAPSTAPAPPSRGGRWIQQWDPEDETFWNETGEKIAKRNLLFSVLSEHIGFSIWTMWSVLVLFMGPEYGLTPADKFLLTSMVTLVGAVVRVPYTFAIAIFGGRNWTIVSAALLLIPTVAAFTVMEPGTSFNTLLLIGLLAGIGGGNFASSMTNINAFFPLRKKGWALGLNAGGGNIGVPVIQLVALAIIGASGGPRVLLGIYIPLIVIAAVLAALFMDNIASVKNDTGAAKDAAKDAHTWIMSFLYIGTFGSFIGYSFAFGQVLTNQFGRTPLEAAYVTFIGPLLGSLIRPLGGWLADKYGGAKITLYNYVGMGAATAVLIAASMEKSLVLFTVAFVVLFVLTGLGNGSTFKMIPGIFQAKALAKGLDGEAAAAYGRRLSGASMGLIGAVGALGGVGINLAFRQSFLSYGSGTGAFVAFLAFYAACFLVTWAVYLRRPATAQTAESSDSEAKPQLSYAEV

SEQ ID NO: 183 - protein, 566 aa, Klebsiella pneumoniae
MNSSFSSAISGPGSSVPGADNAAYSLARTRIPRCSSSALSALHRVKSKQTSVCSPSRLRCAMISRSVTFTGSAIRPSRVAKAKSSHRYLSPVDLIYLLLSGQVEGNMSVQNDKDNHYLLNNWRPENKAFWENKGKTIARKNLWISVACLLLAFCVWMLFSAVAVNLNKVGFQFTTDQLFLLTALPSLSGAILRVPYSFMVPLFGGRYWTVLSTVILIVPCIWLGVAIQNITTPLWVFIIIALLCGFAGANYASSMGNISFFFPKAKQGSALGVNGGLGNLGVSVMQMVAPAVIFLPLFTFLGVHGVTQPDGSTITLSNAALVWVPLLLLATVAAWFGMNDIAGSKASIRDQLPVLKRPHMWLLSLLYLATFGSFIGFSAGFAMLAKTQFPAVDILKLAFFGPFIGALARSFGGIISDRLGGVRVTLVNFVLMALFTGLLFLTLPGSGSGSFLAFYVVFMGLFLTAGLGSGSTFQMIAVIFRQLTIDSVKQRGGSDEEAQHEAVTDTAAALGFISAIGAIGGFFIPKAFGTSLAMTGSPVGAMKVFFVFYVVCVLVTWLVYGRRKPA

SEQ ID NO: 184 - protein, 497 aa, Yersinia intermedia
MTHYFPFVVTLTEVFMSHSPTPLTNSSPSATPTKLAGGQSIQQWYPEDPQFWQQVGHRVARRNLWISVPALLLSFCVWMLFSAVAVNLNKVGFNFTTDQLFMLTALPSVSGALLRVPYSFVIPVFGGRRWTAISTLFLVIPCLWLGIAVQDSDTQYGTFVLISLLCGFAGANFASSMANISFFFPKAKQGGALGLNGGLGNLGVSVMQLIAPMAISVGVFSAFMGSGYPQADGSQLWLQNAAYIWIPFLLIFSVAAWFGMNDLSAAKASIIQQLPVLKRGHLWILAVLYLATFGSFIGFSAGFAMLAKTQFPDVVILHYAFFGPLLGALARPMGGALSDRFGGIRVTLVNFILMAIFAALLFLTLPGANVNGSFFAFFGVFMLLFLTAGLGSGSTFQMIAVIFRKLTVDRVTLAGGSDEQAQHDAVRESAAALGFISAIGAIGGFFIPKSFGTSLALTGSPAGAMKLFVVFYVVCVLITWFVYGRKLNAGMATKKPR

SEQ ID NO: 185 - protein, 446 aa, Desulfitobacterium hafniense
MDNSKRSSMLRKLKILQWPMYVICVLCYMLTLFHRITPAIMGPDLMADLSLGAVAFGFMGMAFTWIYAFAQAPVGTMLDSLGARRGLTAILMIAAIGSLVFSLAENFTVLIIGRILLAVAVSGFLIGGAKIISAWFTTRQYPMLWGIFMGLGSLGSVLGTAPLRTLMSFAGWRTALFGIAVFSLILAVVTYILLRDKPAERGLLTPDELHGETAVVAAISEEAGQEKVPFTAVLKMPVLWLIGLLSLGVNSSSQTFGSMWEGIYLTDALALSKEASGDILSWYAWGLFAGCILSGAVVRKIGSKKTMVLGCILFLFNWLWIALQPATISITELSFFNFLMGALQMLVISTTFIYIREVMPTSRLGTAMGIVNSFAWIFGAGLFQQIWGIIINAVSDGIKPYPVYAFQVTLWLQVIMICLGVICSIVLYRKDFGGKEKSVKLTNHAV

SEQ ID NO: 186 - protein, 439 aa, Saccharopolyspora erythraea
MAVQAQNGSTNHPAVRKRRVRIRYVVLAVLFVSTAINYLDRTNLSVAAPHIQHDLGLSATELGVILSAFSWGYAFLQIPGGWLLDRIGPRLAFGWALVLWSLATVATALARGFGSLFAVRASLGVLEAPAFPANGRLAASWFPSSERGRATAIYTAGEYVGLALAVPVLSMLVVAFGWQSVFVVTGVAGLVWAVVWFRQIRNTPQEDPRVDDDELAHIEERHLGRANVVPSSAKLNWADLRYLLTRKRLWGIYLGQFAINSAMFFFLTWFPSYLTQSRGLELMEAGFYASIPYLAALAGVLLGGWWSDSMLRRGVSVNVARKTPIITGLFLATVIVAANYVDDVGLIVAIMSVAFFAQGMAAISWLLPPEIAPSRMVGLTGGVFNFVGNLGGASTPIVIGMIVDATGSFAGGLVFMSCVALMGALSYVFLVDKVERLEG

SEQ ID NO: 187 - protein, 434 aa, Terriglobus roseus
MLNPAGIGDLSTPVASTVHDERSTNGTHPIRWLFAGLLLLASVMNYIDRQTLSVLAVTVQHEMKLTDVQYGYVVQCFLLTYMVMYVVSGRLVDRYGARRTQGVFLLSWSLANALTGFATGFVSLMGCRAMLGAAEPGNYTASLRAVNDWFSAKQRALAVGIYSMGGTLGAAIAVPLTTTLALRYGWRSAFVVTGAMGAVIAVLWLLVYRDPPRRAEQPLLPAVPWKTVLRQPLLLEMLGTRMLTDSVWYFFLFWISKYLQESRGFTLAEIGASVWVLFVGADLGALGGGAVSGLFVARHGLLNARLRTMLPAAICMFSLAVVPTLHDRVAILSLLTLLAACHMVWMTNVTTLTLDLYPRTMATTIQGLIGAASSIGGLISAGLIAHTIQTHGYRPVFLILALMHPIAATVLFIRLRPLMRRTEISMEKTQSNEA

SEQ ID NO: 188 - protein, 459 aa, Halogranum salarium
MNKDICYLTPQSDENRYVISKHESRDSARSNAFSRFPHSVFRPHSRRMTSRSTTTHSDDFTSNEPQQKGQSTWGIVAGASLISTGLAAYEIVPASVTPLIRDSLHIGPTIAGFLVGIMFGTAVIASLPAGAVLDRTDSRNVMALAVLTLIVAGTWGWIAGKQGDYRSVIASRALGGVAYVIVWNAGIDLVSQAATSETRATAVGIFTASGPIGFALGQGTGPLIAHQFGWPAIFVAFTGLTVIGLVVFWPASRGLEPSREDAPSVQEFGAVLRNRKVWSIGLLGFLGYSLYLFVNSWGASYLTAELGLSLAVSGLLVAVFPAIGVVSRISSGLLSDRVFGGRRQPIVLGSFAVSAPLVLFFTRFRSLPLLVALLLLTGFAVQLTLGLSFTYVREVVDSRVAATAVAFQTSVGLAGAFLAPIAGGVIVDLAGFDTAFLLAGLLAVCGIAVAWRAPEPGYS

SEQ ID NO: 189 - protein, 446 aa, Pelotomaculum thermopropionicum
MSQAATETSTNKVQVSSQLAKKMLRYRWVCYGILLFTYVFVYFDRVCPAVVAPELMKEFGLTATALGILSSMYFYPYAAMQIPSGILSDYLGPRFSVGTFFLIAAIGTIIFGLSKTFGIAIFGRFLMGVGVAVVWIPCMRILANWFRPKEFATLTGLMLTLGNVGAIIASAPLAVIVGAMGWRAAFYWVGAGLVIVAILNYVLLRNKPQDMGLPTVSEIDGVEYYKTNDASDNATFLQNCGKLFRMKNYWLIAIYAFCIYGTVMGFQGLWFVPYAQDIYGLSKQTAANMLMLWPIGMACGCFFIGLASDRVLKSRRKASLYGMIIYIITWLPVVFITEQISVWFFYPLLFLMGFFCGSYVPNYAHVSEGQPHSFIATANGMVNIWYFVGGAFFQTIMGRVLDAYGKVGGKFPVEAYQKAFILCIIALVVGAIAMYFTEDSKALQKG

SEQ ID NO: 190 - protein, 443 aa, Pseudomonas sp.
MSPELAPVTVKKIIRKVMLRIIPLTFFLYFVAFLDRVNLGYAALQMNADLALTSEAFGFAAGIFFIGNVLFEVPSNMLVIKFGPRVWIARIILTWGVVATLTAFVQTANQLYVLRFLLGVAEAGFLPGMVFYFALWFREKERATATGLFLLAAPVTYLVGAPLSTALMHYVTLGDIAGWRWMLFLEGLPAIVGGVLCYRYLLDSPQKATWLTQSEKDWLAAEFEREKASQPPVTHLGTWQALTNPIILYLSVIYFLSQVGALGIGYWLPQIVQNLSAAFSLTQIGLIAGLPYAAAGVGLVIWARLSDRFYERKFFTAIPLLLGAIGLFVAGTTQDPYLGMAAITLALTGIFATKSPFFAMLTQLFSKPTVAVAAAIISSLGNCGGFVGPYIVGVVKKATGTSSAGLFVLSGALLLAALMTLFIVVPRHKSKQASLQALKMKEQ

SEQ ID NO: 191 - protein, 392 aa, Prevotella dentalis
MKTVENHSSSMMRILPVMFGFFIMGFVDIIGMANNYIKHDFADLTDSIANLISLSCFIWFFLCAIPTGMLMNRIGRKKTVALSFCVTALAMLVPLADYSFGMMLVTFSLVGIGNTILQVALNPLVTNVVTPKQLTGTLTLGQFIKAVSSFLGPIIVAWAVGTAYGWKMIFLFYAATSLLAFVWLWATPIPESEPSAQPNVSFLMTLSLLKDPYILAFFLGIVVLVGVDVSINLTFPKLMMERCGLPLSEAGMGNSVYFFARTVGAFVGGLFLLRMSEVKFYVFSIWLALVGLLMLAVCQPIGLVYLSIVVFGLGYANLFSIIFSLSMKRLPSRANEVSALLIVGLVGGGILPPILGLCTDSFGSQLVAVIFLICMWGYMFWLTRRVKSVSPL

SEQ ID NO: 192 - protein, 402 aa, Arthrobacter phenanthrenivorans
MSSVLDKSTAAPARSTNLAMAILSLAMGGVGIGVTEFTMMGLLKEVEQGLAISTPEAGHLISAYALGVVVGAPLLAAVGAKLPRKHLALGLMLIFTVANFASYLAPDYGMMLVSRFAAGLPHGAFFGVAAVIAASLVPPTRRGWAISMVMAGLSISNVVGVPFATWLGQTYGWRLLFILVGFIGLLTLLMVWKFVPFQDAHPDASIRRELGALKRLQVWLAILIGIVGFGGFFATYTYIAHTMTLVAGIPSSLIPLVVALYGLGMVAGNIVGGRLADRSVMGTLYSVLPAIAAALVVYAVAAHWPWSAFVMVFVVGASGSMLIPALQTRLLDASPDAPSLASSLNHAALNVANALGAFLGGLVIALGWGYVAPALVGAVLAILGLGVAVASGLLERRKPLTA

SEQ ID NO: 193 - protein, 409 aa, Flavobacterium frigoris
MQTLSSTEKTISNPVLAQKTVYSILFSIAFAHLLNDLMQSVIPATYPILKDNFQLNFTQIGLITFVYQLTASLLQPFIGFYTDKKPKPYSLVIGMVFTISGLTLLSFATEFWMILAAVSLVGVGSSIFHPEASRVAFLGSGGKRGLAQSIFQLGGNTGSAIGPLMVAVIVAPYGQFYIIWFILAGFLGMWVLSRIAVWYENHLSLRASKKIVIEEDVVPLSKTKIRISIGILLLLIFSKFFYMTSMSSYFTFYLMHKFGLSIQDSQFHLFVFLASVAAGTLIGGPLGDRFGRKYIIWISILGAAPFTLLLPYADLFWTGVLSVIIGVVIASAFSAILVFAQELMPGKVGMISGLFFGFAFGMGGLGSAFLGYLADQTSIEYVYQISSYLPLIGIFTYFLPNIKKKVVPS

SEQ ID NO: 194 - DNA, 1356 bp, Rhizobium sp.
atgcgcggtaaacaggctcctgacggggcctttttttatgcccggaattcgggcgacgcctcgtcagatttccctcgtcaccccacaggcaagacggtcaaaaccatgacggacaacaatcccattcgaactccgcgcacccgagcgaccgaaaatacagcgacagcagctgctgcgccccgattgacaaccctcatctttctctcggcgctctctgtgctgccggtgaacatgatcctgccatcgctgcccaggattgccggtgaatttcatgctgactacgctctcgtcaatctttcggtagccggctacacgatcgtcacggccctgatagagatcgtcgccggtgcgatgtcggatcggtatgggcgcaggccggtcgcattgaccgccgtctccattttcatcgtcgcgtcgatgggctgcgctctggcgaccaatatcggcaccttccttgtttttcgggcgatgcaggcctcgatcggcgcctgcttttccgtcgctctcgttgtcgtcaaggaaacatcaggggagcgcggcacggcaagcagaattggctacgtctccatgggatgggcgattgcacccatggtcggcccgatgtttggcgggttactggacgagctgttcggatggcgggcgatcttcgttgtcctcgccatccttggtgtggccgtcctcgctctgtccatgcgcgaactaagggaaacctccacgcgcgcatcgaggccgaagacgcattaccttgcctcctacgcgcaactgctcagttcggcgcggttctgggcctataccctgtgcatggcctgttccatgggaacgctctacatcttcctcggaggagcacctttggcattcaaccactcgctcagcggatcgagcgccatactcggcttctacatgggaatggtcccggcgggcttcattctgggcagctatctggctggccgctacgcctcccgaaatgcgctgagcaccgtcctcatcgtagcgcgtctcttcacctgcatcgggttgctggctggtctggttctcgtgatgtcaggcactgctcacgttcttgcattctttggaccccgcatgttcatcggcatcggtaacgggttgaccatgcccgccggcaacaccggtgttctatccgtgcgccccgacctcgcgggcaccgctgcgggactatctgctgcgatgaggctcgccggcggagcgctcatcggttccgtggccggtctatttctggcgcggtcaggcacaatccatgccttgttcgtcatgatgctggtgtcggcattgctcgcattgtttgcggcattttatgcagctttcgtcgatcggcatatttccaagccggttacctga

SEQ ID NO: 195 - DNA, 1227 bp, Burkholderia phytofirmans
atgggagataaattcagccgagcgcagaagaccgcagtgattgcaggtcttttcctcgcgtgggcggtcggttacgccgaccgcattctgatgagcgtcgcgctcgttccaatctcgaaggagttcatgctcaccgctcaggagggaggcatgcttctgagcgcgttctatttcagctacgcaatcatgcagttagccggtggctggctgtccgacaagttcggctcccggattgtcgtggtcgcgtgcgtcgtaatgtggtccatcttcaccggcgtgactagcttggggtggtcgtttgcgtcgctgctggtgattcgcttcatgttcggtctcggcgaaggcagcttctcgcccgcgagttctgtcacggtcgctgaagtgttccccaagaagcaacgagcgagagccaaatcctttctcgtctccacgacgtttctgggcagtgccgttggctcagcaatcattgcagcgagcgttaccaagcttgggtggcgtggggcgttcgacattctgtctgttgtcggcttcgccgtcgctgtcattctctggttcagtctgcgtggcgataagcgagcgcggcagaagactgatgtagagcgtcctcgcgtcgcctggaagccagttcttcaatcccccttggcgtggaagctcacggcagtgtggtttttcaccagtgccttgcatgtcggtgtgaattcgtggatgccgacctacctcatgacgagctatcacatcagcttgaagcacgccggacttgctctggtcgtgcccaacctgattgcgttcgcaggcgctaatacggtcgggtttttcctggacaagctcgataagcgttttgagaagggttgcttggtcgcgggctcggctctcagcactgttttcttggtgcttatgattacaaccacccaaatttggctgctgcttacatactggacgctcttctccttgtcgttcaatctggtgtacgccacagtattcgccactccgctgcgtcgggtaccggagcaattgattgggaagacctctggtcttatgaacttcggcggtcaactggcgaactccatcttccctgcaattatgggcgcccttatcacagcagcaaatggagcattcttctcagctttctatctgctcattggggtcggagttttgtcggtggtcgctgcgctcgtattcaaggttccgaatgagactaacagctcacttgaattggcgataaattga

SEQ ID NO: 196 - DNA, 1272 bp, Bacillus subtilis
atggttgtttatgaatggcagtgctcaacaacatgcggaggggccgataaagtcccgatgacatacattcaaaaaggcacaccggtttttcggaaaattacgtttgctttctttgccgcgggttttaatacatttgcgatactttattgcgtacagccgctcatggaggaattcacgcgagaatttcatgtaacgcctacggcggcgagtctttctttatctgttaccacaatgctgttagctgtgagcatgcttgtctttggttcgttgtcagaggtgtgggggcgcaagccgattatggctgtatccatgctggccgcatccgttctctgtctggcgtcgtccttcagcccgaactttcatacgctgcttgtattgagaaccattcaaggggttgcgctcgctgggcttccgtcgattgcgatggcttatctcggagaagaaatagaacccggaagccttgggtcggcgatggggctgtatatcagcggaaacgcgataggcgccgtttttggaaggatcgtttcagggctcctgagcgagttttttaattggcatatggcgatgggggcaattggtgtaattagtttgatcgcaagtattatattttttatgaatttgcctccatccaggcacttcacgccgagaaaattggagctcgggcaattgggaatatctttaatcagccacttgaaggatcggaaactattaagcttgtttctcattggttttttactgctcgggagcaatgttgcattgttcaactacattgcgtatgtgctgttggaaccgccgtattcgtttaataaagcaattgtcagctggatttttattgtgatgattgtagggattttcagctcatctttcattggaagaatggttgatcaatatggttatccgaaaatcctgatgatgaatatcttcatcgtcatcgcaggtgctttattaacgataaacagtatgttagcagtgaaaattctggggattgcgctctttacattcggcttcttcggcgggcattcagtcgccagcagctgggtaggcaggagagccctgcacaacaaagcgcaggcttcatcgctgtacttgttcttttattatgccggttcaagtatttgcggaacggtcggcgggctattctggtctgcttttcattggctgggtgtcgtcggtatgattgtcatcatgctgctggttgcgtttgggctgtcgggatacttggctagaagtgtgaaaatgccggataaaagtaacgaaaaaggattggattga

SEQ ID NO: 197 - DNA, 1305 bp, Yersinia ruckeri
atgatgcgtaaaattaaaggcttacgctggtacatgatagccttggtcaccttgggtaccatactgggttacctgacacgtaatgctattgccgttgccgcacctacgcttcaagaacagttgcatatcaccacgcaacagtactcttatattatcgcagcctattccgctgcttataccctaatgcaaccggtagctggctatgttcttgatgtcatgggaacaaaagtgggctacgccatgttcgccgtcatgtgggcaatcttttgtatgagtaccgcattggccagcagttggggtggtttggcgattgcccgtggtgcggtaggtgctgctgaagccgctatgattcctgccggcctgaaagccagtagcgaatggttcccggctaaagaacgttccattgccgttggttatttcaacgtgggttcatcaatcggtggcatgattgctccaccgctggtggtctgggctatcgtcatgcatagctggcaaatggcctttgttcttaccggtatactgagcctgatctgggctatctgttggttgattttctataagcatccgaaagatcagaaacgactgacagatgaagagcgcgactatattttaaatggacaggaagcgcatcactccgttgccaacgctaaaaaaatgtctgccatgcagattatccgtaaccgccagttctggggcattgctattccgcgttttctggctgaacctgcctgggggactttcaacgcctggattcccctgttcatgtttaaagcctatggttttaacctgaaagaaattgcgatgtttgcctggatgcctatgctgtttgccgatcttggctgcatcctgggtggttacctaccgccgctgttccagaaacacttcaaagtgaacctgatcgtttctcgaaaactggtggtcactatgggggggctgttaatgatcgcacctggcaccatcggcctattcaccagtccttatgtcgctatcgcactgttgtgcatcggtggttttgctcaccagtctctttctggtgcgctgattaccctgtcttccgatgtattcggtcgtaacgaagtggctactgccaacggtctgactggcatggccgcctggacagccagcaccctgtttgctctggtcgtcggtgctctggcagatactctcggttttagcccactgtttgccgcactggctgtctttgatgtactggcggtgattgttatctggacggtgctgcaaaatcgcaccgccgacgactcccatatcgacccaatacaacaagcaccggctgagcaaaactaa

SEQ ID NO: 198 - DNA, 1506 bp, Xanthomonas campestris
atggtagcgctatcacccgtggcgcaatgccaccctcgtgcaggtgcagtggtcgatgaatcgaaccgaagaacatacggccaccgcgccacgttcaccgcgttgccgcattgcgcacaggggcaacgcgtacaaggcattggcatgttgccgttgcgcgctgccgccgcggtgcacgttgtgagcgagttgccggtgaacgcagcagcgaccgggccgctggcgcggctgggccggatgcgctggcgtgtgtgcgcgctgttgctggcggccaccaccatcaattatgtcgaccgccaggtactgggcgtgctggcgccgtttttgcagacgcagatcggctggaacgaaatccagtacggctacattgtcaccgccttccaggccgcgtatgcgcttggcttgctgtgcagcggcgcggtgatcgaccgcttcggcacgcgcgcaggctatgccttggccatcggcatctggagcctggccgcgatggggcatgcgctggccaccaccgtggtgggctttgcgattgcgcggtttttcctggggctgggcgaatcgggcaatttcccggcggcgatcaagaccgtggccgaatggttcccgcgccgcgagcgtgcgctggccaccggcatcttcaattccggctccaacatcggcgccattgtcgcgcccttgctggtgccggtgatcgccaccgcctggggctggcaggccgcgttcttgttcaccggtgtgctcagtgccacctggctggtggtgtggtggtgcagctaccacccacccgagcagcagccggggctgacggcggccgagcttgcgcatatccgcagcgatgcgcacgagccggtgcagcgccggttgtcgtggctgcaggtgatgcgccaccggcaggcctgggcatttgtgctgggcaagttcatcaccgacccgatctggtggttcttcttgttttggctgcccaaattcctgcacgccgaatacggcctgagcctgctgcaactgggcgcgccgttgatcgtgatcttcgtgctggccgatatcggcagcatcgccggcggctgggtggccgggcgcttcattgcgcggggctggagcgtcaaccgcgcgcgcaagaccgcgatgctgatctgcgcgttgtcggtggtgcccatcgtgtttgccgcgagtgccgacaatctctgggtggcagtcggtttgatcggcctggccactgccgcgcatcagggttggtctgccaatttgtttaccctgccgtcggacatgtttccgcgccacgcggtggccaccgtggtgggcatcggcggctttgccggcgcggtgggcggcatgttgatcgccaccttcatcgggtttttgctgcaagccaccggcagctacgtgccggtgttcctgatggcgggctcggcctacctgctggcgctggccatcgtgcaccatctggtgccgcggctggagccggcgcagctgcccgccgatgcacccgcacctcccgccacgcacccctga

SEQ ID NO: 199 - DNA, 1314 bp, Sorangium cellulosum
atgagaaagatgcgttgggtcgtgctttttctgtgctttctcgccgtcgccatcaactacatcgatcgcgccaatctggcggtcgcggcgccccagatcgagaaggagctcggcatcggccccgcccagatggggtttatcatgagcggcttcttctggacctacgcgctcatgcagatgccgttcggctggttcgtcgaccgcgtgggcgcacgcgtcgcgctgccgatcgccgtcggctggtggtcgctcttcaccgcggcgaccgccggcgcgtcgagcgtcgcggccatgttcggctgccggttgctgctcggcgtgggtgaagccggcgcctacccggcctgcgccaagcttgtgagccaatggttcaagccgcgcgagcgcgcgctcgcgacgggcatcttcgacagcggcgcgcgcgtcggctcggcgctgtcgattcccctcgtcgcgctcatcatcgacacgctcggatggaaggcggccttcatcatcacgggcctgttcggcgcggtgtggatcctcggctgggtcgtcatctacaggagccccgcgcatggcgacatgacgggcgagaaggacgtcgtccacgcagcgcccgcagaggacgcgcagaacagcgtgacgtgggcgtcgctcttccgccatcgcacgctctggggcatgatgctcggcttcttctgcctcaacttcaccaactacttcttcatcacgtggttcccgagctacctcgtgcagacgcgcggcttctcgctcaagtcgctcggcacgctcggcatgatccccgcgctgatggcgatcccgggcggctggatcggcggctttgtctccgacgcgctctatcgccgtggctggagcctcaccgctgcacgcaagacctgcatggtcggcggcatgctggtgtcgtcggcgatcacgttgtcggcgttgacctccaacatctatctgatgctcgccttcttcggcatctcctacgcgagtctcgcgttcgccggcgccagcatctggtcccttcccggcgacgtcgcgcccacgccgcgccatgtggcttcgatcagcggcatccagaactttgcgtcgaacctggccggcatcgtcatcacgacgttcaccggcgtgatgctctcgctgaccaaaggatcgttcacgatcccgctcgtcgtggcgggcggcttctgcctgctcggcgcgttcagctacctcgtcatcgtcggcaagatcgagccgctccaggtcaggtcggcaccgatcgcggcgaggtcccccagcctggagtttgaccgagatagttcgcctaccagcgcaggatga

SEQ ID NO: 200 - DNA, 1383 bp, Burkholderia xenovorans
atggaaacgcgtatccggcgtgtcaagacacgccatatcatcctggcggtcatgtgcctgatgtatttcatctcatacatcgatcgggtcaacattgccgtggccggcccattgattcgtcacgagatgggtctcacgaccgttcaactgggactggtgttttcggctttcgcttatccgtatgcggcaatgcagattatcggcggctggctcgccgacaagttcgggccgaaactggtgctgacggtgctctcgctgatctggggcgtggccacgttggccaccggctttgccggcagcgtcacgatgctggtcctgatgcgcttcgcgctcggcgtcggcgaaggcggggcgtttcccaccgcgacgcgggccttcacctactggatgccggtcgccgagcgcggctttgcacaaggcattacccacagtttcgcgcgcctgggcggcgcggtcacgccgccgctggtgctggccgtggtggccacgggcggctggcgcgatgcattcattctgctcggcatcgcgagcctcgcctggactgtgctctacctgttcgtgttcaccaactcgccggaacagaaccggcgcatcacacccgaggaaaccgcggaaatcggctaccgcgccggcgactgcgaccgcgccaaacacgcggccacgccgtggcgcaaactggtgcgccggatgtggctcgtcacctttgtcgacttctgctatggctggttgctgtgggtctatctgacctggttgccgtcctatctgcgcgaatcgcgaggcttcgatctcaagcaactggcgctcttcaccgcgctgccgctgctggcgggagtggtcggcgacacgctcggcggcgtcgtgtcggacaagctttacaagatcaccggccggctgcgctttgcgcgctgtgcggtgctggtggtgggcatgggcggctcgctggtgtttctgctgccgatggtgtccgctaccgatccgctcaccgccgtgtggttcctgtcggcttcgttcttcttcctggaaatcaccaacccggtgctgtggacgttgccgctcgacattgccggcaagtacgcgggcacggccggcggcatgatgaacacgggcttcggtgtcgcggggatgatctcgccggtggcgttcggctttctgatcgagaagaccggcagctacaacgtgccgttcaatatctccgcgggactgctcgcggtcggtatcgtggcggcgctattcatcgacaccggcaagaccgtcgaggccgacgaggagcgcgagcgcgccgccggcgcggagctcggcggcatgccgtcgttcctgcacgcgggggcggcggttcggctggagcgccatcacttgcgccggccattgcggtggcgcaagtga

SEQ ID NO: 201 - DNA, 1545 bp, Metarhizium acridum
atgggcttcaatatatctttgttatggaagaccccgatggtcgaccccatcaacaagaaagctcgaagtatacctgttctgaacgtagttgatccgtatggacgagtatttttcttctcttggatggggttcatgcttgggttttgggcatggtacacgtttcctccattgttgacagtcacgattaaaaaggacctgcacctcagcgccgccgaggtagccaactccaacattgtatccctctgtgctactctacttctacgattcgtcgccggacccctctgcgaccagttcggctcccggagagtctatgcctcactcctcctcctgggctgtctaccggtcggcctcgcgcccctcgtcaagaccgccaacggcctctacgtctcccgattcttcattggtattctcggagccacgtttgtcccatgccaagtctggtgcaccggcttcttcgacaagaacattgtcggcacggccaatgctctctctggaggatggggcaacgccggcggcggcatcacctacttcatcatgccggccgtcttcgactccctggttgcttcccagggcatggctccgtccaaggcatggcgagtcacctttgttgtccccctcatttgcctgatcgcctgtgctctcggcatgctattcctctgcccggacacccccctgggcagctgggaagagaggtcgcaaaagctccaagaaaacctggaccaatacagccccacgagcaccacggccgtcaacacgcctcacatcctcagcgagccgccgagtcgagacgtagaaaaggcggaagaattcgacgaagactcgaaattctacaagcaaccgtctgccatctccttgtcggaagccgtggccattgcccaggcggaaaccgtggtcaagcccagcttcaaggactctctacccgtcatgctctccctacagaccctcttccatgtcgccacgtactcgtgttcattcggcggcgagctggccgtcaactccatcctcagctcctactacaaggccaactttccacacttggaccagaccaaagccagcaactacgccgccatcttcggcttcctcaactttgtcacacggccgctcggcggcgtcgtggcagacatcctgtacagaatgtccggacaaaacctgtggacgaaaaaggcctggatcaccatggccggcctcctgagcggggcgttgctcatcatcgttggaaaggttgatccttcggaagccaatggccgcgacatcggcacaatggtaggcctcgtcaccgtcgccgccttcttcatagaggcaggcaacggtgccaatttcgccctcgtgcctcacgtctatcctgccgccaacggcgtcttatccgggtgcaccggcggcggcggcaacctgggcggcgtggtattcgccatcatcttcaggttcatcgatcacggcagcggctacgccactgcctgctgggtcatcggcgtcattcatattgccgtcaacttggcagtctgtcggattccgccgctgccaaagggccaagtcggcgggcagtaa

SEQ ID NO: 202 - DNA, 1599 bp, Ricinus communis
atggctagcacagaagagatgtctccaggaagctctatgcatggtgtttcaggcaaagaacaaacctttgctttttcagtaaccaatgaccctgaaatcccaacagataccactgcaaaattctcacttccggtggattcagaacacaaagccaaagtgttcaatctcttatccttagctaatccacacatgaccactttccacctttcttggctctccttcttcacttgcttcgtctcaactttcgcagcagctcctttagttcccatcattagagacaaccttaacctgacaaagaaagacataggcaatgctgggattgcttctgtttctggaagtatcttctctaggcttgtaatgggtgcagcttgtgatctattaggtccacgttatgcctgtgcttttcttattatgctttctgcacccacagttttttgcatgactttcgtgtcgtctgctggaggatatgtagctgttagattcatgattggattttcattagcaacatttgtttcctgccagttttggatgagcactatgtttaatggtaagattattggagttgttaatggaactgctgctggatggggtaatatggggggtggagctactcagttgcttatgcctttgctttatgagttaattaaaagagctggggctacaccttttactgcttggaggattgctttctttattcctggttggttacatgtgattatggggattctggttttgagtttaggccaagatttacctgatggtaaccttagcactttgcagaagaagggggatgttcccaaggataagttttctaaggtcctatggtatgctataacaaattacagaacttgggtctttttccttctatatggaatgtcattaggagtggaactaactactgacaatgttattgcagaatacttctttgacagatttgacctcaagctccgcacagccggcaccatagccgcaatctttgggatggccaacatctttgctcgccctatgggtggcctcatgtctgacattgccgcccgcagatttggaatgcgtggccgcctctggaacctttacatcctgcaaacactaggaggcatattctgcatatgccttggccgagtcagctctctcccgctctctgtcctcttcatgatcctcttctccttgggtgcacaagccgcctgtggcgctacctttggtatcatccccttcatctctcgtcgttctttaggcatcatttcaggactcactggtgcaggtggcaattttgggtcagggttgactcagcttttgttttttacaagctcaacatacactacagcaactgggttgtctctgatgggaatcatgatagttgcttgtacgttacctgtgacacttgtgcattttccacaatggggtagcatgttcttgcctgcaacaaagaatgtggagaaatgtagcgaagagtattattatgcctcggaatggaatcaagaagagaaagagaaagggttgcaccaaggaagccttaagttcgccgagaatagccggtcagagaggggacgacgggtcgcttctgctgctacaccacctagttctacagctgctaatttgtag

SEQ ID NO: 203 - DNA, 1401 bp, Acinetobacter sp.
atgtcttcaaatattaatttagatgcaaaaaaagcgactgaaattaaattattcagtttttcaaccccagccatgcgtgctttccacatgacttggctcgcgttctttgtctgcttcttcgcatggtttgcttgcgctccattaatgcccgttattaaaggtgagttcggcttaaccaaagatcaaattgccaatattaatattgccgccgttgcaattacaattttagtgcggcttgctgtcggaccactttgtgataaatatggtccgcgtattacttacaccacccttctcttactgggcagtattcctgtatttggtgttgccgctgccaacagctatgaatcttttcttttcttccgtttactcatcggtgcaattggcgcaagctttgtcattacgcaatatcataccagtatcatgtttgcaccaaatgtcgtaggcacagcaaatgcagctgctgcgggttggggtaatgctggcggtggtgcaacacaagctctaatgcctttattactcggtgcaattgtaatgttcggtgtcgagcaaactatgggttggcgcgttgcattaatcgtaccaggcgtaatgatggtaattgttggggttctttactggaaacttacccaagactgtcctcaaggaaactttaaagaagttcgtgcacaaggtattgaggtgggtagcggtaaaaaaggtggcatggcaatcttaatgcaagcggctcgtaactaccgtgtctggattttattcctcgcttatggtgcttgctttggtattgaaattttcatccataatgttgccgcaatgtactatgttgaccaattcaaaatggatttaaaaacagcagggttaaccgcaggtatatttggccttcttgccttatttgcacgtgcattaggcggtattatttccgataaagtcgcacttaaaaaaggtttagacggacgtactaaagtacttgtactgatgattttaggtgaaggtttattcttaatactcttctctcaaatgaacgtcgtagctcttgcaattatttccatgacagtttttgcattgtttacccatatggcttgcggagcaacatatgcactagtcccttttattgaccgaaatgcattaggcggcgtcgcaggcattattggcgcaggtggaaatgtgggcgcagtagcagctggtttcttactaaaaggcgtacttgatattcaaacttgtctatttattttaggtggactggttatggttgcaggctgtagtgtaattttgattcgcttcacaaccgagcacaaagaaaaagaaaaaatacttttgaacaagctctacttgaacgcaattcagcagcttaattctgataagaagcagaaatcacaaatgatttttgcttcttcacctttttcataa

SEQ ID NO: 204 - DNA, 1290 bp, Streptomyces flavogriseus
atgggacgcctacggtgcgccgcctcctcgaatggctcaacccgtcgtgccccgccctccccttccctcttgacttgcggtgtggagacaaccgctgcgcagtcccccgccccggtccggagagaagccgccgccttccggaacctgatcacggccacggtcggcttcacgctgaccttctgggcgtggaacctggtctcgccgctgtcgggggccttcaaggaccggctggatctgagctccttccagcagtcgctgctggtggcggtgcccgtgctggtcggctcgctcggccgtgtcccggcgggcgcgctgaccgacaggttcggcgccaagctgatgttccccctcgtctcggcgctgacggtcgtcccggtgctgctgctcatcccggcgaaggacaactacgcggccatgctggccgtcggattcctgctcggcctcggcgggacgacgttcgcgatcgggatccccctggtcaactcgtggttcccgcccgcgaaacgagggctggcgctgggcatcttcggcatggggatgggcggagtcgcgctgtccggatacttcacgccgcggatcgccgagcacgacgtgaacctgccgttctggatcgtcgccggcgcgctcctcgtctactcgctcctcgccgcggtcctcatcaccgaccacccggaccgcaaggtgcccgaggactcgctgggccaccggctggggcaggcgggccggctgcgggtgacctgggagctgtccgccctgtacgcgatcggcttcggcggcatcgtcgccttcggcgtgtacctgccgacatacctgaagacctggtacgagatgtcaccgaccgaggcgggcaccaaggcggcggggttcgcgctggtcaccgtcgtcttccggccggtgggcggctggctgtcggaccggatccacccggccctcgtcacggccgcggcactgctgctggcggcgctgatggccgtcgtccaggccttcgacccgccgctgtacccgctcggcaccatcgcgctgctcgccatggcggccggactcggcaccgcgagcgggagcgtcttcgccctggtctcgcaggtgacgccgcaggccgcggtgggcagcgtcaccggcatcgtcggcgcgatgggagggcttggcgggttcgtccccccgctggtcatgggcgccatctacagcgcgaagagctcgtactcgatcggattcatgctcctctccgacctggcgctggcgggcgcggtctacgcctacggccggatgcggaccctccggcgcgacggctga

SEQ ID NO: 205 - DNA, 1257 bp, Mycobacterium gilvum
gtggaagtcgtcgggcaaacatgcttgtctgggcgggtgagcacggcgactacgccggacatcggcgcacggcggggactcaatctggctctggccacctgggtttctgcgatcaacttctgggcctggaacatgatcggcccgctctcgacgacctacgccggggacatgtcgctcagcagcagccaggcatctgtgctggtggccaccccgatcctggtcggggcgctgggccggatcgtggtcggcccgctgaccgaccggttcggcggacgcgtgatgttcatcggggtgaccgtcgcgtccatcgtgccggtgctcgcggtcggcgtcgcgggcacacaggggtcctacccgctgctggtggtgttcggcctcttcctcggcatcgcgggcaccgtcttcgctgtcggcatcccgttcgccaaccactggtacgacgcgtcgcggcggggattcgccaccggcgtcttcggcatggggatggtcggcaccgcgatgtcggcgttcttcaccccgcggttcgtcaactggttcggtctgttcaccacgcacgtgatcatcgccgtggcgctggccctcaccgcggtgctgtgcctggtggtcatgcgcgattcaccgcagttcaccccgaaccacgacgcggtgatgccgaagctccgggcggccgcgaaactgccggtgacatgggagatgtcgtttctctacgcggtggtgttcggcggcttcgtcgcgttctccaactacctgcccacctacatcaagacgatctacgacttctccgccgtcgacgccggcgcgcgcaccgcggcgttcgcgctcgccgcggtgctggcccgtccggtcggcgggatgctggccgaccgcatcccgccgaagtacgtcgtgctgggatcgttcgccggcaccgcggcggcggcattcgtcgcgatcttccaaccgccaccggatctctggtcggcggtcacgttcatcacgctcgcgctgttcctgggtatcggtaccggcggggtcttcgcctgggttgcgcggcgggcccccgccagctcggtcggctcggtcaccggcatcgtggcggccgccggtgggctcggtggctacttcccgcccctggtcatgggcggcacctacgacagcgtcgacaacgactacaccatcgggctgtcgctgctcgtcgcgaccgcgctgatcgctctgctctacaccgcgttgcggttgcacgcccacgagccgaaacccacgcaggaggtcaggtga

SEQ ID NO: 206 - DNA, 1503 bp, Bacillus sp.
atgaagacgcaaaaattgcagctaccacttcaaactgcaagcttagttgttggttttatggtatgggtgattctttcatccctgatgtctagcattaaacaggatattccattaacggctaaccaaactgcgatggttactgctgttccagtcattttaggttccttattacgaatactattaggattttggacaaatcggtatggggcaagatggttgttttttatcggatttgtcattctggtccttccaatcttttatataagtatcgcggattcaatgtttgatttaatactaggtggacttgtccttggaattggtggtgcgctattttcaattggggttacctcgcttccgaagtactaccctaaagaacgtcacgggtttgttaacggaatttatggagctgggaatattggcaccgccatcacatcttttgcagcaccagctcttgcggtcaatattgggtggcaaagcactgttcgcttatttttaattcctgtcattctatttgcacttttaaactttttgctaggtgaccgtgacgaacctaaagtaaataaaccgttaagtgaacaaattaaaagtgtttataaaaatgaaaagctttggtttatcagcttattttattttgtgacatttggatcgtttgttgcgttcactgtgtatttgccgaactttttagttacatattttggattaacgacggttgatgcaggactccgaacggctggatttattacactggccactttgatgagacctatcgggggctggcttggtgataaattcaacccatatttgattttgtttattgtatttaatgtcattacctttgcaggagtgctcctggcttttacacctgatattgtgttgtatacgattggctgcttgctagtttctttgtgcgcagggattggaaatggaacgatatttaagcttgttccgtactatttttcaaagcaagccgggattgtcaatggaatcgtttcagcaatgggcggtttaggtggattcttccctccaattgttctatccatcgtgtttggtatgacaggacattatgcgattggatttatgtcacttgccatgtttgcactattaagttccgtatttgtcgtttggatgttctacactgaaaaaattcaactggaagcaaaacttattgagaatgttgcccaaggcatgatggttacaaatccaaagggagtcatccaaaaggtaaaccatgcctttacaacggtcacaggatttgagccagatgaagcaatcggaaaaacaccaagtattctgcgctccggaaagcatgattcagcattttatgatcagatgtgggattcaatacgcagtaaggggtattggcaaggcgaaatttggaataggcgaaaaaacaaagaactttatcgagaatggcttaccataagtgaagtgaaaaacgaagttggtgaagtcaaatactatgtaggtctattcaatgacctcacggaaaaacaggacacataa

SEQ ID NO: 207 - DNA, 1236 bp, Pseudomonas putida
ttgtactaccgagtgaggtgttcgatgagtgccagcttctggaaatccgggcatgtgcccacgctgttcgccgcgtttctgtacttcgacctcagcttcatggtctggtacctgctgggcccgttggcggtgcagattgctgccgacctgcaactgagcgcacaacaacggggcctgatggtggccacgccgatcctggccggggcaatcctgcgcttcgccatgggcgttctggtcgaccgcctgtcgcccaagacggctggcctgatcggccaggtggtggtcatcgtcgccctggccgcagcctggcaccttggcgtacacagctatgaacaggccctgctgctaggcgtgttcctgggctttgccggtgcgtccttcgccgtttcgctgccgctggcctcgcagtggtacccgccacagcaccagggcaaggccatgggcatcgccggcgcaggcaactccggcacggtgttcgcggccttgctggcaccggcactggcagccggctttggctggaacaatgtgttcggctttgcgctgatcccgctgtcactggcgctggtggtgttcgccctgttggcgcgcaatgccccgcaacggcccaagccgaaagccatggccgactacctcaaggcactgggcgaccgtgacagctggtggttcatgtttttctacagcgttaccttcggcggcttcatcggcctggccagcgccctgcccggctatttcagcgaccaatacggcctgagcccggtcaccgccggctactacaccgccgcttgtgtgttcgccggcagcctgatgcgcccgctcggcggcgccctggctgaccgttttggcggcatccgcaccctgctgggcatgtacggcgtggccgccatctgcattgccgcagtcggcttcaacctgccctctgccgcggccgcactggcgttgttcgtcagcgccatgctcggcctgggtgccggcaatggcgcagtgttccaactggtgccacaacgcttccgccaagagatcggggtaatgaccggcctgatcggcatggccgggggcatcggcggcttcctgctggcggccgggcttggcaccatcaagcagcacactggcgattaccaactggggctgtggctgttcgccagcctgggcctgctggcctggttcggcctgcacggggtgaaacagcgctggcgcaccacctggggctcggctgcagtcaccgcagcacgggtctga

SEQ ID NO: 208 - DNA, 1455 bp, Mycobacterium rhodesiae
atgcagacttcaaccacccgccgtggctacgacatcgacgactgggatgccgaggacgtcgaggcctggaacaacggcggctcgaaaatcgcacgccgcaacctgatctggtcgatcttcgccgagcacgtcggattctcggtgtggtccatctggtcggtgatggtgttgttcatgccgcagaacgtctatcacatcgacgccgcgggaaagttcttcctcgtcgccgtcccgaccctcgtcggcgccgtgctgcgcatcccctacaccttcgccaccgcccacttcggtggccgcaactggacgatcttctcggccctggtcttgctggtccccaccgccctgacgctgtacttcatggcacacccgggcgcgtcgtacacgacgttccttgtggtggccgccttcgccggactgggcggcggtaacttcgcctcatcgatgaccaacatcaacgccttctatccgcagcgatacaagggctgggcgctggggctcaatgccggcggcggcaatatcggtgtcgcggttatccagctcgtcgggttgctggtcattgcgaccgtcggtaatcggtcgccgcatctggtctgcgccgtctacctggtgttgatcgcccttgccgcactgggtgccgcggtctccatgaacaacctcaccaaccagcgcagcgacgctcgatcgctgatcgaggttcttgcacaccgtgattcgtggctgatctcactgctctacatcggcaccttcggctcgttcatcgggttcggcttcgccttcggccaggtgctgcagatcaacttcctggccggactgtcgcacggcggacccgtcaccccggcgatgaccgcccaggcatcgctgcacgccgcccagatcgcgttcctcgggccggtgctcggctcgctgtcccggccgttcggcggttggctgtccgatcgcttcggtggcggcaaggtcaccctgtacaccttcggagcgatgatcgccgccgcggcgtggctggtcgcggccggtgagatcgacgacgccgcagccggacccgcgtcgggtgccacgatggcggcgttcatcgccggattcatcgccctgttcgtgttgtccggcatgggaaatggctccacctacaagatgatcccgtcgatcttcgaggccaagtccaagagtttggagcacctcagtgcccaggagcgcagcgcctggtcgctgcggatgtccggcgcgctgatcggcatcgccggggccatcggcgccctcggcggggtcggcgtcaacgtcgccctgcgggcgtcctacctgtcgccggcgaaatccgcgacgatggccttctgggtattcctcggcttctacgtgttatgcgcgatcatcacctgggtggcctacgtccggacccccaagaaggtgggagtcctgcgcaccgacaaccccgcggtcgacaacgccgcagccacagcatga

SEQ ID NO: 209 - DNA, 1386 bp, Streptomyces turgidiscabies
atgacagcccctagcacagcccccgcacccccaagcaggggcggccgctggatccagcagtgggatccggaggacgagaccttctggaacgagaccggagagaagatcgccaagcggaaccttctcttctccgtcctgtccgagcacatcgggttctcgatctggaccatgtggtccgtgctggtgctcttcatgggcccggagtacgggctcacgccggcggacaagttcctgctgacctcgatggtgacgctggtcggagccgtggtccgcgtcccctacaccttcgccatcgcgatcttcggcggccggaactggaccatcgtctccgccgccctcctgctcatccccaccgtcgccgcgttcacggtgatggagccggggacctccttcaacacgctcctgctgatcggcctgctggcgggtatcggcggcggcaacttcgcctcgtccatgaccaacatcaacgccttcttcccccttcgtaagaaggggtgggccctcggcctgaacgcgggcggtggcaacatcggagtgccggtcatccagttggtggcgctcgcgatcatcggtgccagcggcggcccccgggtgctgctggggatctacatcccgctgatcgtcatcgcggccgtcctcgccgcgctcttcatggacaacatcgcctccgtgaagaacgacaccggcgccgcgaaggacgccgcgaaggacgcgcacacctggatcatgtccttcctctacatcggcacgttcggttcgttcatcggatacagcttcgccttcgggcaggtgctgaccaaccagttcggccggaccccgctcgaggcggcgtacgtcaccttcatcggcccgctgctcggctccctgatccggcccctgggcgggtggctggccgacaagtacggtggcgcgaagatcacgctgtacaactacgtcggcatgggcgccgcgaccgcggtcctcatcgcggccagcatggagaagtcgctggtcctgttcaccgtcgccttcgtggtgctgttcgtcctcaccggcctcggcaacggctcgaccttcaagatgatccccggcatcttccaggcgaaggcgctggccaagggcctggacggagaagccgccgctgcctacgggcgacgtctctccggtgcctccatgggcctgatcggtgcggtcggcgcgctcggcggcgtcggcatcaacctcgccttccggcagtccttcctctcctacggttccggaaccggcgcgttcgtcgccttcctcgccttctacgccgcctgcttcctggtcacctgggccgtataccttcgccgcccggcgaccgcgcagacggccgaatcctcggactccgaagcaaagccgcagctcagctacgccgaggtgtga

SEQ ID NO: 210 - DNA, 1701 bp, Klebsiella pneumoniae
gtgaattcttcgttttcgagtgcaatatctggcccgggcagtagcgtgcccggggccgataatgccgcttactctttggcgcgcacgcggatcccgcgctgctcttcgtcggcgctcagcgctttacacagggtgaaatcaaaacaaacctcggtgtgctctccctcaagattgcgctgcgcgatgatctcgcggtcggtcacttttaccggatcggcaatcaggccgtcgcgggtggcaaaggcaaaatcgtcccacaggtatttatcgcctgttgaccttatttatttactcctttccgggcaagtagagggcaatatgtcggtgcagaatgataaagataatcattaccttttgaacaactggcggcctgaaaacaaggcgttctgggaaaataaaggcaaaaccattgcgcgaaaaaatctatggatatcagtggcctgtctgctacttgctttctgcgtatggatgttattcagcgccgtagcggtcaatctcaataaggtcggttttcaattcaccaccgaccagctttttttattaaccgccctgccttcactttccggcgcgatattacgggtcccctactcctttatggtacccctttttggcgggcgctactggaccgtattaagtaccgttatcctgatcgtgccttgtatttggttaggggtggcaatccagaatattactactccgttatgggtatttattattattgcgctgttgtgcggttttgccggagcgaattatgcttccagcatgggaaatatcagtttctttttcccaaaagcgaaacagggcagcgcgctgggagtcaacggcggccttggcaatctgggcgtaagcgtgatgcagatggtcgccccggcggtcatcttcctgccgctcttcacctttctcggcgtccatggcgtcacccagcccgatggttcgacaatcaccctgagtaatgcggcgctcgtctgggtaccgctgctgctgctcgccaccgtcgcggcatggttcggcatgaacgatatcgccggttcaaaggcctcgattcgcgatcagcttcccgtgctcaagcgaccgcatatgtggctgttaagcctgctctatctggcgacgtttggctcgttcatcggcttttccgccggctttgccatgctggcgaaaacccagtttcccgcggtcgatatcctcaagctcgccttctttggaccgttcatcggcgcgctggcgcgctcgttcggcgggatcatctccgaccgtctcggcggcgtgcgggtgacgctggttaacttcgtcctgatggcgctgtttaccggcctgctgtttctgaccctgccaggcagcggctccggcagctttctcgctttctacgtggtgtttatggggctctttttaaccgccggtctgggaagcggctccaccttccagatgatcgccgtcatcttccgccagctcaccatcgacagcgtaaaacagcgcggcggcagcgatgaagaagcgcagcacgaggcggtgaccgataccgctgccgcgctgggctttatctcggcgatcggcgccatcggcggcttctttattccgaaagccttcggcacttcgctggcgatgaccggctcaccggttggcgcgatgaaagtcttttttgtcttctatgtggtttgcgtgctggtgacctggctggtctacggccgccgtaaacccgcttaa

SEQ ID NO: 211 - DNA, 1494 bp, Yersinia intermedia
gtgacgcattacttcccgtttgtggtcaccctgactgaggtttttatgtcgcactctccgacgccattaactaactcatcaccttcagctaccccgacaaaattggccggtggccaatcaatacagcagtggtacccggaagatccacagttctggcaacaggtagggcatcgtgtcgcccggcgaaatttgtggatttcagtaccggcattgttactgagtttctgtgtctggatgctgtttagtgcggttgcagtaaatctgaataaagtgggctttaacttcaccaccgatcaactgttcatgctgacagcattaccctcggtatcgggggcgctgttacgtgttccatactcgtttgttataccggtctttggtggccgtcgctggacggctattagcacactgtttctggttattccctgcctttggttaggtatcgcggtacaagacagcgatacccagtatggaacatttgtattgatttcattgttgtgtggttttgctggtgcgaattttgcctccagcatggctaatatcagtttcttcttcccgaaagcaaaacaggggggagcgttgggcctcaacgggggattggggaatcttggcgttagtgtgatgcagcttatcgcccctatggctatttcagttggggtgttcagtgcctttatggggagtggctatccgcaagcggatggtagccagctctggttgcaaaatgccgcctatatctggatcccatttttgctgatattcagtgtggcggcctggtttgggatgaatgatttgtctgctgccaaagcttcgatcatccagcaattaccggtcctaaaacgtgggcatttgtggattttggccgtgttatacctggcaacttttggctcattcattggtttctcagctggatttgctatgttggcaaaaacacaattccctgatgtcgttatcctgcattacgccttcttcggcccgctattgggtgcactggctcgcccgatgggcggtgcgctttctgatcgctttggcggcattcgcgtcaccttagtcaattttatcctgatggcaatatttgcggcattactcttcctcaccttaccgggtgccaatgttaacggctccttctttgccttttttggcgtattcatgctgctgtttctgacggcgggactgggcagcggatcaacgtttcagatgattgcggtgatctttcgcaagctaactgtcgatcgggtgaccctcgcgggggggagtgatgaacaagcgcagcacgatgccgttagagagtcagcggcggcactgggtttcatctcagccattggcgctatcggcggtttctttattcctaaatcttttggtacgtcgctggccctgaccggttcaccggccggcgcgatgaagctattcgtggttttttatgtggtttgcgtattgatcacctggtttgtctacgggcgcaagctcaacgcgggtatggcgaccaaaaaaccacgttga

SEQ ID NO: 212 - DNA, 1341 bp, Desulfitobacterium hafniense
atggacaattccaagcgaagttctatgcttcgcaaattgaaaattttacaatggcccatgtatgtcatttgcgttttatgctatatgcttactttgttccatcggattacgccggctattatgggacccgatttaatggcagacctttccctgggtgcggttgccttcggcttcatgggcatggcctttacctggatctatgcctttgctcaagccccggtaggcactatgctggatagtttaggcgcccgccggggactgacggcaattcttatgatagcggccattggctcactggtcttcagccttgctgaaaattttacagtgttaattatcggtagaatccttctggcagtagccgtgtctggttttttgatcggtggggcaaaaataatctctgcttggtttacgacccgtcaatatccaatgctttggggaatatttatgggactgggttctttgggcagcgtcctgggcacagcgccgctaaggacattaatgagttttgcagggtggagaacagctttattcggcatagcagttttttccttgatattggcagtggtaacgtatatcttattgagagataagccggcggaacgagggttgcttacaccggatgaactccatggggaaactgcagtggttgccgccataagcgaagaagccgggcaagaaaaggttccctttactgccgtactcaaaatgcctgtcttatggttaatcggtttactgtctctcggtgtgaactccagttcacagactttcggctccatgtgggaaggcatctatctgaccgatgccctggcattatccaaggaggccagtggggatattctgtcctggtacgcatgggggctctttgcaggatgtatcctaagcggtgcagtggtcagaaagattggctccaagaaaaccatggtattgggttgtattttgtttttgtttaactggctatggattgctttgcagccggcaaccataagcattacagagttaagcttttttaatttcttaatgggggcattacagatgctggtcatctccaccacatttatttatattcgtgaagtcatgcccacatcccgtttagggactgcgatgggaatcgtgaacagctttgcctggatttttggagcaggactttttcaacagatttggggaattatcatcaatgccgtttctgatgggataaagccatatcccgtatatgcatttcaagtaaccctttggcttcaggtgatcatgatctgtttaggcgtcatttgttctattgtcctttaccggaaagattttggaggaaaagaaaaaagtgtaaagctaacgaatcatgcagtgtaa

SEQ ID NO: 213 - DNA, 1320 bp, Saccharopolyspora erythraea
atggcagtacaggcccagaacggcagcacgaaccacccggcggtccggaaacgacgcgtcaggatccgctacgtggtcctcgcggtcctgttcgtcagcacggcgatcaactacctggaccggaccaacctgtcggtcgcggcaccgcacatccagcacgacctggggctcagcgccaccgagctgggcgtgatcctctcggcgttctcgtggggctacgcgttcctgcagatccccggcggctggctgctggaccggatcgggccgcggctggccttcggctgggccctggtgctgtggtcgctcgccacggtggcgaccgcgctggcccgcgggttcggttcgctgttcgcggtccgcgcgagcctgggggtactcgaggcccccgccttcccggccaacggacgcctggcagcgtcctggttccccagctccgagcggggtcgcgccaccgcgatctacaccgcgggcgagtacgtcgggctggcgctggccgtgcccgtgctgtcgatgctggtcgtggcgttcggctggcagtcggtcttcgtggtcaccggcgtggcgggcctggtctgggccgtggtgtggttccgccagatccgcaacaccccgcaggaggacccgcgggtcgacgacgacgaactggcccacatcgaggagcggcacctggggcgggccaacgtggtgccgagctcggccaagctcaactgggccgacctgcgctacctgctgaccaggaagcggctgtggggcatctacctgggccagttcgcgatcaacagcgcgatgttcttcttcctgacctggttccccagctacctcacccagtcgaggggactggagctgatggaggccggcttctacgcctcgatcccctacctggccgccctggccggcgtgctgctcggcggctggtggtcggactcgatgctgcgccgcggcgtctcggtcaacgtcgcgcgcaagacgccgatcatcaccgggctgttcctggcgaccgtcatcgtcgcggccaactacgtcgacgacgtcggactgatcgtggcgatcatgtccgtggcgttcttcgcccagggcatggccgccatctcctggctgctgccgccggagatcgcaccgtcgcggatggtgggactcaccggcggggtgttcaacttcgtcggcaacctcggcggcgcgagcaccccgatcgtcatcggcatgatcgtcgacgcgaccgggtcgttcgccggcggactggtgttcatgagctgcgtcgcgctgatgggcgcgctcagctacgtcttcctggtcgacaaggtggagcggctggagggctga

SEQ ID NO: 214 - DNA, 1305 bp, Terriglobus roseus
gtgttaaaccccgctggcatcggcgatctctccacaccggtcgcgtcgaccgttcacgatgagcgatcgacgaatggtacccaccccattcgctggctctttgccgggctgctcctactcgcctcggtgatgaactacatcgatcgacagacactctctgtgttggccgtaacggttcagcatgagatgaagctcacggatgtgcagtacggctatgtggtgcagtgctttctgctgacctatatggtgatgtacgtcgtgtcgggccggctggtagatcgttacggcgcacgacgcacgcaaggcgtctttctgctcagctggtcgttggcgaatgcattgacaggctttgccacaggattcgtctccctcatgggatgccgagccatgctgggcgcggccgaacccggcaactacactgcttccctgcgcgccgtgaacgattggttctctgcaaagcagcgcgcgctcgccgtcggtatctacagcatgggcggcaccctcggcgctgcgattgccgttcctcttacgaccacacttgcccttcggtacggatggcgtagcgcctttgttgtaactggtgccatgggcgccgtcatcgccgtgctctggttgctcgtctatcgggacccgccaaggcgtgctgagcagcctctgctgcctgccgtaccctggaagaccgtcttgcgccagccgctcctgctggaaatgctgggcacccgcatgttgacggactccgtctggtacttcttcctcttctggatttcgaagtatctgcaggagtcgcgcggcttcacacttgctgagattggtgccagcgtctgggtactcttcgtcggtgcagatctcggcgcgctcggcggcggtgctgtctcaggcctcttcgtcgcgcgacacggcctgctgaacgcgcgtctgcgcaccatgctgcctgccgccatctgcatgttcagcctggcagtggttcccacgctgcatgaccgtgttgccatcctgagtctgctcacgctactggccgcgtgccacatggtgtggatgaccaacgtgaccaccctcacgctggatctctatccacgcacaatggcaaccaccatccagggcctgatcggcgctgccagctccatcggaggcttgatctccgcggggctgatcgcacacaccatccagacgcatggctaccgtcccgtatttctgatcctcgcgttgatgcatcccatcgccgccacagttttgtttatccgtctgcgtccgctcatgcggcgcacggagatatccatggagaaaactcaaagcaatgaagcttga

SEQ ID NO: 215 - DNA, 1380 bp, Halogranum salarium
atgaacaaagacatttgctatctaacccctcaaagtgatgagaatcgatacgtaatatcgaaacacgagtctcgggattcagctcgctcaaacgctttttcccgatttccgcattccgtcttccgaccacactctcgaagaatgacttcccgatctaccactacccactccgatgacttcaccagcaacgaaccgcaacagaagggccagtcaacgtggggaattgtcgctggggcaagcctcatctcaacaggcttggctgcgtatgaaattgtccctgcgagtgttaccccgctcattcgtgactcgctgcatatcggcccgacgatcgcggggtttctcgtcgggatcatgttcggtactgcagtaattgcaagtctgccagctggtgcagttctcgaccggactgattctagaaacgtcatggcactcgcggttctcacactaattgtcgctggaacgtggggctggattgctggaaagcagggagactaccggtctgtaattgcatcacgagcgcttggtggggtcgcctacgtcatagtatggaacgctggcatcgatctcgtgagtcaggcagcgaccagcgaaacccgtgcgacagctgtcggcatcttcactgcgagtggcccgatcggatttgcgcttggtcaaggaactggtccactgattgctcaccagtttggatggcccgcaatctttgttgcgtttactggtctcacagtcattggtctcgtcgtgttctggccggcaagtcgagggcttgagccgagtcgagaagacgctccttcggttcaggagttcggcgcggtcctccggaaccggaaggtctggtcgattgggctgctcggctttctcggctattcgctatacctgttcgtgaatagttggggcgcgtcctatctcaccgctgagcttggattgtcgctcgcagtgagcggtctcttggtggcagtgttccctgccattggcgtggtgtccagaatcagcagtgggctcttatctgatcgggttttcggtggtcgccgccaacctattgtccttgggtcgtttgcagtttccgcgcccctcgtgctattcttcactcgatttcggtcacttccactgcttgtcgctctcttgcttctcaccggttttgcggttcagctaacgctgggcctctcctttacatacgttcgagaggtcgttgattcgcgggtcgctgcgacggcagtcgcattccaaaccagtgttggattggcaggggcattccttgctccgattgcaggcggcgttattgttgacctcgctggcttcgatacggcgttcctactcgctgggctcctcgctgtttgtggcatcgcggttgcatggcgagctccagagcccggctactcgtag

SEQ ID NO: 216 - DNA, 1341 bp, Pelotomaculum thermopropionicum
atgagtcaagcggcaaccgaaacaagtactaataaagtgcaggtatccagccaactggctaagaaaatgctgcgttaccgttgggtttgctacggtatcttactgtttacctacgttttcgtctattttgaccgtgtctgtccggccgtcgtggcacctgaattgatgaaggagtttggcttgacggctactgcgctgggtattctgtcgtcaatgtatttctacccttacgccgcaatgcagatcccgtcggggatactctctgattacctgggaccgaggttttcagtaggtacatttttccttatcgctgctatcggcacaatcattttcggtctctcgaaaaccttcgggattgcaattttcggccgctttctgatgggcgtcggtgtggccgtagtgtggataccctgtatgaggatattggccaactggttccggcccaaggagtttgccacgttgacgggtctgatgctaaccctcggcaacgtcggcgccatcattgcctccgcaccgctggcagtaatagtaggcgcaatggggtggcgcgcagcgttttactgggtaggcgcaggtctggtaattgttgcgattttaaactatgttttgctcaggaacaagccgcaagatatgggattgcccaccgtttcggaaattgacggagttgagtattacaagacgaacgacgcttcagacaatgcaacttttctgcaaaactgcggaaagctgttcaggatgaaaaactactggctgatagcaatttatgcgttctgcatttacggtacggttatgggattccagggactctggtttgtgccctacgcacaggatatttacggtctttccaaacaaactgccgccaacatgctaatgctgtggccgattgggatggcttgcggctgcttctttataggcctggcttccgacagggtgctgaagtcgaggcggaaggcgtccctctacggcatgattatctatataataacatggttgccggtagtgtttattactgagcaaatatctgtatggtttttctaccccttgcttttcttaatgggctttttctgcggcagttacgtgcccaactatgcccatgtatctgaaggacagccccacagcttcattgccacggccaacggtatggtcaacatctggtactttgtcggcggggcgtttttccagaccataatggggcgcgtgctggacgcctacggcaaagttggtggcaagttcccggttgaggcttatcaaaaggccttcattctttgcataattgcccttgttgttggtgcaattgccatgtatttcacagaagattcaaaggccttgcaaaagggatag

SEQ ID NO: 217 - DNA, 1332 bp, Pseudomonas sp.
atgagtcccgagcttgcccccgtcaccgttaaaaagatcatccgaaaagtcatgctgcggattatcccccttaccttttttctctatttcgtagcctttctggacagagtcaacttgggctatgccgcgctgcagatgaacgctgacttggcactgaccagtgaggcgttcgggtttgcagcagggattttttttataggtaacgtgttatttgaagtgcccagcaacatgctggtgatcaaatttgggccgcgggtttggatagctcgaataattctgacctggggtgtggttgcgactctgacggctttcgttcaaaccgcaaatcaactgtacgttttacggttcttactcggcgtcgctgaggcaggctttctgccaggcatggtgttctatttcgccttgtggtttcgcgaaaaggagcgtgccacagcaaccggcctcttcttgcttgcagcacctgttacttatctggtgggagcgccgctcagcactgcgctgatgcactacgtcacactcggcgacatcgcagggtggcgctggatgctctttctggaagggttacccgcgatagtgggcggcgtgctgtgttatcgctacttgttagacagcccgcagaaagccacctggctcactcagagtgagaaagactggttggcggccgagtttgagcgagaaaaagccagccagcctcccgttactcacttgggtacgtggcaagcgttgaccaaccccataatcctttatttgtcggtcatctatttcctttcccaagtaggtgcattgggtatcggctattggttgccccagatagtccagaacctttcagcggctttttcattgactcaaattggcttgattgccggccttccgtatgcggcagctggtgttggcctcgtgatttgggcgcgtttgtcggaccgcttctatgagcgcaaattttttactgccattccgttattgctgggggcgataggcctgttcgtcgcaggaaccactcaagacccttacctaggcatggcggcaattacgttggcgctgaccggaatcttcgctacgaaatcgccattttttgccatgttgacgcagctatttagcaaaccaacggtggcggttgctgcggcaatcatttcatcgctaggtaactgcggtgggttcgttggcccttatatcgtgggcgtggtcaagaaggcgaccggtacgtcctcggcggggctgttcgtattgagcggtgcattgttattggcggcactaatgactttgttcatcgtggtacctcgccacaaatcaaagcaagcctcgttgcaagcactgaagatgaaagagcagtga

SEQ ID NO: 218 - DNA, 1179 bp, Prevotella dentalis
atgaagacagtcgaaaaccattcaagttcaatgatgagaatcctcccggttatgtttggattcttcatcatgggttttgtcgatattatcggcatggccaataactatatcaagcacgactttgcagacctgacagattccatagccaacctgatttccctgtcctgctttatctggttcttcttgtgtgccattcccacgggcatgctgatgaacaggattggtcggaagaagacggttgcgctgagcttctgtgtcacggccttggccatgcttgttccgctggccgactatagttttggcatgatgctcgtcacattttcactggtgggaattggcaataccattcttcaggtggcactcaatccattggttacgaatgtcgtcacgccgaagcagctgacgggtacactgaccttgggccagttcatcaaagctgtgagttctttccttggccccatcatcgtggcttgggcagtgggtacggcgtatggatggaaaatgatatttctgttttatgcagccacctctttgctggcctttgtgtggctttgggcaacccccattcccgaatcagagccgtctgcgcagcccaacgtctcttttttgatgacgctctcgctgttgaaagacccttatatcttggctttcttcctgggcatagttgtccttgttggcgtggatgtcagtatcaatctcacgtttcccaagctcatgatggagcgttgcggccttccgctgagcgaagccggcatgggcaacagcgtctatttctttgcgcgcacggtgggtgcatttgtcggtggactctttctgctgcgaatgtccgaggtaaaattctatgtctttagcatttggttggcattggtcggcttgctgatgctggctgtttgccaacctattgggttggtatatctgagtatcgttgtctttggtctcggctatgccaacctgttctctattatcttctctctttcgatgaagcgtttgccaagcagggctaacgaagtgtctgcattgttaattgtcggtcttgtgggtggcggcatactgccgccgatactgggtctgtgcacagacagctttgggtcacagctggtcgctgtcatctttttgatttgtatgtgggggtatatgttctggctgacgaggcgtgtgaaaagcgtaagtcctctgtaa

SEQ ID NO: 219 - DNA, 1209 bp, Arthrobacter phenanthrenivorans
atgagcagcgttctcgacaagtccacggcagcccccgcccggtccaccaacctcgcgatggccatcctctccctggccatgggcggggtgggcatcggggtgacagagttcaccatgatgggcctgctgaaggaagtggagcaggggcttgcgatttcgacgcccgaggccggccacctcatctctgcctacgcactgggcgtcgtggtgggagcgcccctgctcgccgccgtcggcgccaaactcccgcgcaagcacctggcgctcgggctgatgctgatctttacggtggccaactttgcctcctacctcgccccggattacggcatgatgctggtctcgcggttcgcagccggactgccgcacggcgccttttttggcgtggcagctgtgatcgccgcatccctggttccgccgacgcggcggggctgggcgatctccatggtgatggccggcctgagcatctcgaacgtggtgggcgtgccgttcgccacctggctggggcagacgtacggctggcggctgctgttcatcctggtgggcttcattggcctgctgaccctgctcatggtgtggaagttcgtccccttccaggacgcacatccggatgccagcatcaggcgtgaactcggcgccctcaaacggctccaggtgtggctggccatcctgatcggcatcgtgggcttcggcggcttcttcgccacctacacgtacattgcccacaccatgaccctggtggcgggcattccctcgtcactgattccgctggtggttgcgctctatggcctgggaatggtggcgggcaacatcgtgggcggcaggcttgcggaccgctccgtcatgggaaccctgtactccgtgttgcccgcgatcgcggctgccctggtggtctatgcggtggctgcccactggccgtggtccgcgtttgtcatggtcttcgtggtgggcgcgtccgggtccatgctgatcccggcgctccagacccggctcctggacgcgtcgccggacgccccgtcgctggcttcgtcgctgaaccacgcggcgctgaacgtggccaacgcactgggcgccttcctgggcggactggtcatcgcccttggctggggctatgtggcacccgcgctggtgggtgccgtcctcgccatcctgggcctgggcgttgccgtggccagtggcctcctcgagcgccggaagccgctgaccgcctga

SEQ ID NO: 220 - DNA, 1230 bp, Flavobacterium frigoris
atgcagactctttccagtacagaaaaaacaatatccaatccagtattagcccaaaaaacggtatactccattttattctctattgcatttgctcatttgttgaatgatttgatgcagtccgttattccagcgacttatcccatattaaaagataattttcagcttaattttacccaaattggtctgattacttttgtgtaccagctgacagcttctttactacaaccatttataggtttttatactgataagaagccaaaaccctattccttagtaataggaatggtttttacgatatctggcttgaccttattatcgtttgccactgagttttggatgattttggcagcagtgtctttagtcggtgtaggttcatcaatctttcatccagaagcctctagggttgcctttttaggttctggtggaaaaagaggattagcacagtctattttccagttggggggaaatacaggaagtgcaataggtccgcttatggtagccgttattgtagcgccttatggacaattttatataatttggtttattcttgcaggtttcttagggatgtgggtattatctagaattgccgtttggtatgaaaatcatttgtcgttacgcgcttctaaaaagatagtaattgaagaggatgttgttccattgtctaaaacgaaaatcagaatttcaattgggattttattattactgatattttcgaagttcttttacatgacaagtatgtcgagttattttactttttatttgatgcataaatttggactttctattcaagactcccaatttcatttgtttgtctttctggcatcagtggctgctggaactttaattggaggcccattgggagatcgttttggaagaaagtacattatttggatatccattttaggggcagcgccttttactttgcttttgccttatgctgatttgttttggacaggtgttttgtcagtcattattggagttgttattgcttcagctttttcagcaattttagtttttgcccaggaattaatgccgggaaaagtagggatgatttcgggattattctttggttttgcttttggaatgggtggcttaggctccgctttcttgggttatttagcggatcaaaccagtattgaatatgtgtatcaaataagctcttaccttcctcttattggtatatttacctacttcttgcccaatattaaaaagaaagttgttcccagttaa

What is claimed is:

3. An isolated polynucleotide selected from the group comprising:
a. a polynucleotide encoding a polypeptide selected from the group consisting of SEQ ID NOS: 1, 2 and 5-32;
b. a polynucleotide selected from the group consisting of SEQ ID NOS: 53-104 or 136-166; and
c. a polynucleotide having 85% sequence identity to SEQ ID NOS: 53-104 or 136-166,
operably linked to a regulatory element that functions in plants.

4. The isolated nucleic acid of claim 3 wherein said regulatory element is a constitutive promoter.

5. The isolated nucleic acid of claim 3, wherein expression of the nucleic acid results in the expression of one or more bacterial MFS (major facilitator superfamily) genes in a plant cell.

6. A plant or plant cell comprising the isolated nucleic acid of claim 3.

8. A plant or plant cell comprising an expression cassette effective for expression of at least one bacterial MFS gene, wherein said expression cassette comprises a promoter that functions in plants operably linked to a nucleic acid, wherein said nucleic acid comprises polynucleotides of claim 3.

9. The plant cell of claim 8, wherein the plant cell is from a dicot or monocot.

11. A plant regenerated from the plant cell of claim 9.

12. The plant of claim 6, wherein the plant exhibits one or more of the following: increased drought tolerance, increased nitrogen utilization efficiency, increased seed yield, increased biomass yield, increased density tolerance and increased density tolerance, compared to a control plant.

13. A method of increasing sink capacity and/or grain dry down in a plant, the method comprising reducing the expression of one or more bacterial MFS genes in the plant, by expressing a transgenic nucleic acid comprising a nucleotide sequence selected from the group consisting of claim 3.

14. The method of claim 13, wherein the transformed plant exhibits one or more of the following: (a) an increase in the production of at least one bacterial MFS; (b) an increase in the production of a bacterial MFS protein; (c) a increase in sink capacity; (d) an increase in ear number and or kernel number; (e) an increase in drought tolerance; (f) an increase in nitrogen utilization efficiency; (g) an increase in density tolerance; (h) an increase in plant height or (i) any combination of (a)-(h), compared to a control plant.

15. A method of increasing yield or drought tolerance in a plant, the method comprising increasing the expression of one or more bacterial MFS genes in the plant by expressing the nucleic acid of claim 3.

16. A method of increasing drought tolerance in the absence of a yield penalty under non-drought conditions, the method comprising increasing the activity of one or more nucleic acid sequences encoding a polypeptide claim 3.

18. Seed of the plant of claim 8, wherein the seed comprises the expression cassette.

19. The method of increasing source capacity of the bacterial MFS transgenic plants to support the increased sink capacity in order to realize increased yield potential.

20. The method of claim 19, where the increased yield potential is due to mature ear length, mature ear width and kernel number per ear.

21. The method of claim 19, which includes increasing source strength of the bacterial MFS transgenic plants by stacking with other genes for more biomass production, photosynthesis or any forms of the transgene manipulation.

22. The method of claim 19, which includes increasing soil fertility through N and fertilizer applications to improve source strength.

23. The method of claim 15, further comprising increasing stalk strength.

24. The method of claim 15, further comprising increasing the availability of nitrogen for enhanced sink capacity.

25. A method of increasing the expression of bacterial MFS or the activity of bacterial MFS in a plant, the method comprising modulating the expression levels of bacterial MFS or the protein level of bacterial MFS or the activity of bacterial MFS polypeptide, wherein the modulation results in an improved agronomic performance of the plant.
